(19) United States
(12) Patent Application Publication
(10) Pub. No.: US 2014/0371417 A1
(43) Pub. Date: Dec. 18, 2014

(54) MICROORGANISMS AND METHODS FOR PRODUCTION OF 4-HYDROXYBUTYRATE, 1,4-BUTANEDIOL AND RELATED COMPOUNDS

(71) Applicant: Genomatica, Inc., San Diego, CA (US)

(72) Inventors: Priti PHARKYA, San Diego, CA (US); Anthony P. BURGARD, Bellefonte, PA (US); Stephen J. VAN DIEN, Encinitas, CA (US); Robin E. OSTERHOUT, San Diego, CA (US); Mark J. BURK, San Diego, CA (US); John D. TRAWICK, La Mesa, CA (US); Michael P. KUCKINSKAS, Escondido, CA (US); Brian STEER, San Diego, CA (US)

(73) Assignee: Genomatica, Inc., San Diego, CA (US)

(21) Appl. No.: 14/262,461

(22) Filed: Apr. 25, 2014

Related U.S. Application Data
(60) Provisional application No. 61/854,611, filed on Apr. 26, 2013.

(51) Int. Cl. C12N 9/04; C12P 17/04; C12P 13/00; C12P 19/32; C12P 7/18; C12P 7/62; C12P 7/24

(52) U.S. Cl. CPC C12N 9/0006; C12P 7/62; C12P 17/04; C12P 7/24; C12P 19/32; C12P 7/18; C12P 13/001
USPC 528/68; 536/23.2; 435/320.1; 435/252.3; 435/190; 435/135; 435/126; 435/147; 435/92; 435/158; 435/128; 560/179; 549/295; 568/496; 536/26.23; 568/852; 564/511; 435/254.2; 435/254.11; 435/252.33; 435/252.2; 435/252.31; 435/252.32; 435/252.35; 435/252.34; 435/254.21; 435/254.23; 435/254.9; 435/254.3; 435/254.8; 528/85; 528/271; 528/361; 568/679; 528/308.6

(57) ABSTRACT

The invention provides non-naturally occurring microbial organisms having a 4-hydroxybutyrate, gamma-butyrolactone, 1,4-butanediol, 4-hydroxybutanal, 4-hydroxybutyryl-CoA and/or putrescine pathway and being capable of producing 4-hydroxybutyrate, wherein the microbial organism comprises one or more genetic modifications. The invention additionally provides methods of producing 4-hydroxybutyrate, gamma-butyrolactone, 1,4-butanediol, 4-hydroxybutanal, 4-hydroxybutyryl-CoA and/or putrescine or related products using the microbial organisms.

[0001] This application claims the benefit of priority of U.S. Provisional application Ser. No. 61/854,611, filed Apr. 26, 2013, the entire contents of which are incorporated herein by reference.

### BACKGROUND OF THE INVENTION

[0002] The instant application contains a Sequence Listing which has been submitted electronically in ASCII format and is hereby incorporated by reference in its entirety. Said ASCII copy, created on Apr. 24, 2014, is named 12956-283-999_Sequence Listing.txt and is 644,912 bytes in size.

[0003] This invention relates generally to in silico design of organisms and engineering of organisms, more particularly to organisms having 1,4-butanediol, 4-hydroxybutyryl-CoA, 4-hydroxybutanal or putrescine biosynthesis capability.

[0004] The compound 4-hydroxybutanoic acid (4-hydroxybutanoate, 4-hydroxybutyrate, 4-HB) is a 4-carbon carboxylic acid that has industrial potential as a building block for various commodity and specialty chemicals. In particular, 4-HB has the potential to serve as a new entry point into the 1,4-butanediol family of chemicals, which includes solvents, resins, polymer precursors, and specialty chemicals. 1,4-Butanediol (BDO) is a polymer intermediate and industrial solvent with a global market of about 3 billion lb/year. BDO is currently produced from petrochemical precursors, primarily acetylene, maleic anhydride, and propylene oxide.

[0005] For example, acetylene is reacted with 2 molecules of formaldehyde in the Reppe synthesis reaction (Kroschwitz and Grant, Encyclopedia of Chem. Tech., John Wiley and Sons, Inc., New York (1999)), followed by catalytic hydrogenation to form 1,4-butanediol. It has been estimated that 90% of the acetylene produced in the U.S. is consumed for butanediol production. Alternatively, it can be formed by esterification and catalytic hydrogenation of maleic anhydride, which is derived from butane. Downstream, butanediol can be further transformed; for example, by oxidation to γ-butyrolactone, which can be further converted to pyrrolidone and N-methyl-pyrrolidone, or hydrogenolysis to tetrahydrofuran. These compounds have varied uses as polymer intermediates, solvents, and additives, and have a combined market of nearly 2 billion lb/year. It is desirable to develop a method for production of these chemicals by alternative means that not only substitute renewable for petroleum-based feedstocks, and also use less energy- and capital-intensive processes.

[0006] Thus, there exists a need for alternative means for effectively producing commercial quantities of 1,4-butanediol and its chemical precursors. The present invention satisfies this need and provides related advantages as well.

### SUMMARY OF INVENTION

[0007] The invention provides non-naturally occurring microbial organisms having a 4-hydroxybutyrate, 1,4-butanediol, or other product pathway and being capable of producing 4-hydroxybutyrate, 1,4-butanediol, or other product wherein the microbial organism comprises one or more genetic modifications. The invention additionally provides methods of producing 4-hydroxybutyrate, 1,4-butanediol, or orther product or related products using the microbial organisms.

[0008] The present invention also provides polypeptides and encoding isolated nucleic acid molecules. The polypeptides and nucleic acid molecules can be used in the production of 4-HB, GBL, 4-HBal, 4-HBCoA, BDO and/or putrescine. The invention also provides vectors containing the nucleic acid molecules, host cells containing the vectors and/or expressing the polypeptides of the invention, culture medium containing the host cells of the invention, methods of constructing the host cells of the invention, compositions having the polypeptides of the invention and at least one substrate for the polypeptide upon which to react, and methods of producing 4-HB, GBL, 4-HBal, 4-HBCoA, BDO and/or putrescine using a host cell of the invention.

### BRIEF DESCRIPTION OF THE DRAWINGS

[0009] FIG. 1 is a schematic diagram showing biochemical pathways to 4-hydroxybutyurate (4-HB) and to 1,4-butanediol production. The first 5 steps are endogenous to E. coli, while the remainder can be expressed heterologously. Enzymes catalyzing the biosynthetic reactions are: (1) succinyl-CoA synthetase; (2) CoA-independent succinic semialdehyde dehydrogenase; (3) α-ketoglutarate dehydrogenase; (4) glutamate:succinate semialdehyde transaminase; (5) glutamate decarboxylase; (6) CoA-dependent succinic semialdehyde dehydrogenase; (7) 4-hydroxybutanoate dehydrogenase; (8) α-ketoglutarate decarboxylase; (9) 4-hydroxybutyryl CoA:acetyl-CoA transferase; (10) butyrate kinase; (11) phosphotransbutyrylase; (12) aldehyde dehydrogenase; (13) alcohol dehydrogenase.

[0010] FIG. 2 is a schematic diagram showing homoserine biosynthesis in E. coli.

[0011] FIG. 3 shows the production of 4-HB in glucose minimal medium using E. coli strains harboring plasmids expressing various combinations of 4-HB pathway genes. (a) 4-HB concentration in culture broth; (b) succinate concentration in culture broth; (c) culture OD, measured at 600 nm. Clusters of bars represent the 24 hour, 48 hour, and 72 hour (if measured) timepoints. The codes along the x-axis indicate the strain/plasmid combination used. The first index refers to the host strain: 1, MG1655 lacI^{Q}; 2, MG1655 ΔgabD lacI^{Q}; 3, MG1655 ΔgabD ΔaldA lacI^{Q}. The second index refers to the plasmid combination used: 1, pZE13-0004-0035 and pZA33-0036; 2, pZE13-0004-0035 and pZA33-0010n; 3, pZE13-0004-0008 and pZA33-0036; 4, pZE13-0004-0008 and pZA33-0010n; 5, Control vectors pZE13 and pZA33.

[0012] FIG. 4 shows the production of 4-HB from glucose in E. coli strains expressing α-ketoglutarate decarboxylase from Mycobacterium tuberculosis. Strains 1-3 contain pZE13-0032 and pZA33-0036. Strain 4 expresses only the empty vectors pZE13 and pZA33. Host strains are as follows: 1 and 4, MG1655 lacI^{Q}; 2, MG1655 ΔgabD lacI^{Q}; 3, MG1655 ΔgabD ΔaldA lacI^{Q}. The bars refer to concentration at 24 and 48 hours.

[0013] FIG. 5 shows the production of BDO from 10 mM 4-HB in recombinant E. coli strains. Numbered positions correspond to experiments with MG1655 lacI^{Q} containing pZA33-0024, expressing cat2 from P. gingivalis, and the following genes expressed on pZE13: 1, none (control); 2, 0002; 3, 0003; 4, 0003n; 5, 0011; 6, 0013; 7, 0023; 8, 0025; 9, 0008n; 10, 0035. Gene numbers are defined in Table 6. For each position, the bars refer to aerobic, microaerobic, and anaerobic conditions, respectively. Microaerobic conditions were created by sealing the culture tubes but not evacuating them.

[0014] FIG. 6 shows the mass spectrum of 4-HB and BDO produced by MG1655 lacI^{Q} pZE13-0004-0035-0002 pZA33-0034-0036 grown in M9 minimal medium supplemented with 4 g/L unlabeled glucose (a, c, e, and g) uniformly labeled ¹³C-glucose (b, d, f, and h). (a) and (b), mass 116 characteristic fragment of derivatized BDO, containing 2 carbon atoms; (c) and (d), mass 177 characteristic fragment of derivatized BDO, containing 1 carbon atom; (e) and (f), mass 117 characteristic fragment of derivatized 4-HB, containing 2 carbon atoms; (g) and (h), mass 233 characteristic fragment of derivatized 4-HB, containing 4 carbon atoms.

[0015] FIG. 7 is a schematic process flow diagram of bioprocesses for the production of γ-butyrolactone. Panel (a) illustrates fed-batch fermentation with batch separation and panel (b) illustrates fed-batch fermentation with continuous separation.

[0016] FIGS. 8A and 8B show exemplary 1,4-butanediol (BDO) pathways. FIG. 8A shows BDO pathways from succinyl-CoA. FIG. 8B shows BDO pathways from alpha-ketoglutarate.

[0017] FIGS. 9A-9C show exemplary BDO pathways. FIGS. 9A and 9B show pathways from 4-aminobutyrate. FIG. 9C shows a pathway from acetoactyl-CoA to 4-aminobutyrate.

[0018] FIG. 10 shows exemplary BDO pathways from alpha-ketoglutarate.

[0019] FIG. 11 shows exemplary BDO pathways from glutamate.

[0020] FIG. 12 shows exemplary BDO pathways from acetoacetyl-CoA.

[0021] FIG. 13 shows exemplary BDO pathways from homoserine.

[0022] FIG. 14 shows the nucleotide and amino acid sequences of E. coli succinyl-CoA synthetase. FIG. 14A shows the nucleotide sequence (SEQ ID NO:46) of the E. coli sucCD operon. FIG. 14B (SEQ ID NO:47) and 14C (SEQ ID NO:48) show the amino acid sequences of the succinyl-CoA synthetase subunits encoded by the sucCD operon.

[0023] FIG. 15 shows the nucleotide and amino acid sequences of Mycobacterium bovis alpha-ketoglutarate decarboxylase. FIG. 15A shows the nucleotide sequence (SEQ ID NO:49) of Mycobacterium bovis sucA gene. FIG. 15B shows the amino acid sequence (SEQ ID NO:50) of M. bovis alpha-ketoglutarate decarboxylase.

[0024] FIG. 16 shows biosynthesis in E. coli of 4-hydroxybutyrate from glucose in minimal medium via alpha-ketoglutarate under anaerobic (microaerobic) conditions. The host strain is ECKh-401. The experiments are labeled based on the upstream pathway genes present on the plasmid pZA33 as follows: 1) 4hbd-sucA; 2) sucCD-sucD-4hbd; 3) sucCD-sucD-4hbd-sucA.

[0025] FIG. 17 shows biosynthesis in E. coli of 4-hydroxybutyrate from glucose in minimal medium via succinate and alpha-ketoglutarate. The host strain is wild-type MG1655. The experiments are labeled based on the genes present on the plasmids pZE13 and pZA33 as follows: 1) empty control vectors 2) empty pZE13, pZA33-4hbd; 3) pZE13-sucA, pZA33-4hbd.

[0026] FIG. 18 A shows the nucleotide sequence (SEQ ID NO:51) of CoA-dependent succinate semialdehyde dehydrogenase (sucD) from Porphyromonas gingivalis, and FIG. 18B shows the encoded amino acid sequence (SEQ ID NO:52).

[0027] FIG. 19A shows the nucleotide sequence (SEQ ID NO:53) of 4-hydroxybutyrate dehydrogenase (4hbd) from Porphyromonas gingivalis, and FIG. 19B shows the encoded amino acid sequence (SEQ ID NO:54).

[0028] FIG. 20A shows the nucleotide sequence (SEQ ID NO:55) of 4-hydroxybutyrate CoA transferase (cat2) from Porphyromonas gingivalis, and FIG. 20B shows the encoded amino acid sequence (SEQ ID NO:56).

[0029] FIG. 21A shows the nucleotide sequence (SEQ ID NO:57) of phosphotransbutyrylase (ptb) from Clostridium acetobutylicum, and FIG. 21B shows the encoded amino acid sequence (SEQ ID NO:58).

[0030] FIG. 22A shows the nucleotide sequence (SEQ ID NO:59) of butyrate kinase (buk1) from Clostridium acetobutylicum, and FIG. 22B shows the encoded amino acid sequence (SEQ ID NO:60).

[0031] FIG. 23 shows alternative nucleotide sequences for C. acetobutylicum 020 (phosphtransbutyrylase) with altered codons for more prevalent E. coli codons relative to the C. acetobutylicum native sequence. FIGS. 23A-23D (020A-020D, SEQ ID NOS:61-64, respectively) contain sequences with increasing numbers of rare E. coli codons replaced by more prevalent codons (A<B<C<D).

[0032] FIG. 24 shows alternative nucleotide sequences for C. acetobutylicum 021 (butyrate kinase) with altered codons for more prevalent E. coli codons relative to the C. acetobutylicum native sequence. FIGS. 24A-24D (021A-021B, SEQ ID NOS:65-68, respectively) contain sequences with increasing numbers of rare E. coli codons replaced by more prevalent codons (A<B<C<D).

[0033] FIG. 25 shows improved expression of butyrate kinase (BK) and phosphotransbutyrylase (PTB) with optimized codons for expression in E. coli. FIG. 25A shows sodium dodecyl sulfate polyacrylamide gel electrophoresis (SDS-PAGE) stained for proteins with Coomassie blue; lane 1, control vector with no insert; lane 2, expression of C. acetobutylicum native sequences in E. coli; lane 3, expression of 020B-021B codon optimized PTB-BK; lane 4, expression of 020C-021C codon optimized PTB-BK. The positions of BK and PTB are shown. FIG. 25B shows the BK and PTB activities of native C. acetobutylicum sequence (2021n) compared to codon optimized 020B-021B (2021B) and 020C-021C (2021C).

[0034] FIG. 26 shows production of BDO and gamma-butyrylactone (GBL) in various strains expressing BDO producing enzymes: Cat2 (034); 2021n; 2021B; 2021C.

[0035] FIG. 27A shows the nucleotide sequence (SEQ ID NO:69) of the native Clostridium beijerinckii ald gene (025n), and FIG. 27B shows the encoded amino acid sequence (SEQ ID NO:70).

[0036] FIGS. 28A-28D show alternative gene sequences for the Clostridium beijerinckii ald gene (025A-025D, SEQ ID NOS:71-74, respectively), in which increasing numbers of rare codons are replaced by more prevalent codons (A<B<C<D).

[0037] FIG. 29 shows expression of native C. beijerinckii ald gene and codon optimized variants; no ins (control with no insert), 025n, 025A, 025B, 025C, 025D.

[0038] FIG. 30 shows BDO or BDO and ethanol production in various strains. FIG. 30 shows BDO production in strains containing the native C. beijerinckii ald gene (025n) or variants with optimized codons for expression in E. coli (025A-025D). FIG. 30B shows production of ethanol and BDO in strains expressing the C. acetobutylicum AdhE2 enzyme (002C) compared to the codon optimized variant 025B. The third set shows expression of P. gingivalis sucD (035). In all cases, P. gingivalis Cat2 (034) is also expressed.

[0039] FIG. 31A shows the nucleotide sequence (SEQ ID NO:75) of the adh1 gene from Geobacillus thermoglucosidasius, and FIG. 31B shows the encoded amino acid sequence (SEQ ID NO:76).

[0040] FIG. 32A shows the expression of the Geobacillus thermoglucosidasius adh1 gene in E. coli. Either whole cell lysates or supernatants were analyzed by SDS-PAGE and stained with Coomassie blue for plasmid with no insert, plasmid with 083 (Geotrichum capitatum N-benzyl-3-pyrrolidinol dehydrogenase) and plasmid with 084 (Geobacillus thermoglucosidasius adh1) inserts. FIG. 32B shows the activity of 084 with butyraldehyde (diamonds) or 4-hydroxybutyraldehyde (squares) as substrates.

[0041] FIG. 33 shows the production of BDO in various strains: plasmid with no insert; 025B, 025B-026n; 025B-026A; 025B-026B; 025B-026C; 025B-050; 025B-052; 025B-053; 025B-055; 025B-057; 025B-058; 025B-071; 025B-083; 025B-084; PTSlacO-025B; PTSlacO-025B-026n.

[0042] FIG. 34 shows a plasmid map for the vector pRE118-V2.

[0043] FIG. 35 shows the sequence (SEQ ID NO:77) of the ECKh-138 region encompassing the aceF and lpdA genes. The K. pneumonia lpdA gene is underlined, and the codon changed in the Glu354Lys mutant shaded.

[0044] FIG. 36 shows the protein sequence comparison of the native E. coli lpdA (SEQ ID NO: 78) and the mutant K. pneumonia lpdA (SEQ ID NO:79).

[0045] FIG. 37 shows 4-hydroxybutyrate (left bars) and BDO (right bars) production in the strains AB3, MG1655 ΔldhA and ECKh-138. All strains expressed E. coli sucCD, P. gingivalis sucD, P. gingivalis 4hbd on the medium copy plasmid pZA33, and P. gingivalis Cat2, C. acetobutylicum AdhE2 on the high copy plasmid pZE13.

[0046] FIG. 38 shows the nucleotide sequence (SEQ ID NO:80) of the 5′ end of the aceE gene fused to the pflB-p6 promoter and ribosome binding site (RBS). The 5′ italicized sequence shows the start of the aroP gene, which is transcribed in the opposite direction from the pdh operon. The 3′ italicized sequence shows the start of the aceE gene. In upper case: pflB RBS. Underlined: FNR binding site. In bold: pflB-p6 promoter sequence.

[0047] FIG. 39 shows the nucleotide sequence (SEQ ID NO:81) in the aceF-lpdA region in the strain ECKh-456.

[0048] FIG. 40 shows the production of 4-hydroxybutyrate, BDO and pyruvate (left to right bars, respectively) for each of strains ECKh-439, ECKh-455 and ECKh-456.

[0049] FIG. 41A shows a schematic of the recombination sites for deletion of the mdh gene. FIG. 41B shows the nucleotide sequence of the PCR product (SEQ ID NO:82) and the encoded amino acid sequence (SEQ ID NO:83) of the amplification of chloramphenicol resistance gene (CAT) flanked by FRT sites and homology regions from the mdh gene from the plasmid pKD3.

[0050] FIG. 42 shows the sequence (SEQ ID NO:84) of the arcA deleted region in strain ECKh-401.

[0051] FIG. 43 shows the sequence (SEQ ID NO:85) of the region encompassing a mutated gltA gene of strain ECKh-422.

[0052] FIG. 44 shows the citrate synthase activity of wild type gltA gene product and the R163L mutant. The assay was performed in the absence (diamonds) or presence of 0.4 mM NADH (squares).

[0053] FIG. 45 shows the 4-hydroxybutyrate (left bars) and BDO (right bars) production in strains ECKh-401 and ECKh-422, both expressing genes for the complete BDO pathway on plasmids.

[0054] FIG. 46 shows central metabolic fluxes and associated 95% confidence intervals from metabolic labeling experiments. Values are molar fluxes normalized to a glucose uptake rate of 1 mmol/hr. The result indicates that carbon flux is muted through citrate synthase in the oxidative direction and that most of the carbon enters the BDO pathway rather than completing the TCA cycle.

[0055] FIG. 47 shows extracellular product formation for strains ECKh-138 and ECKh-422, both expressing the entire BDO pathway on plasmids. The products measured were acetate (Ace), pyruvate (Pyr), 4-hydroxybutyrate (4HB), 1,4-butanediol (BDO), ethanol (EtOH), and other products, which include gamma-butyrolactone (GBL), succinate, and lactate.

[0056] FIG. 48 shows the sequence (SEQ ID NO:86) of the region following replacement of PEP carboxylase (ppc) by H. influenzae phosphoenolpyruvate carboxykinase (pepck). The pepck coding region is underlined.

[0057] FIG. 49 shows growth of evolved pepCK strains grown in minimal medium containing 50 mM NaHCO₃.

[0058] FIG. 50 shows product formation in strain ECKh-453 expressing P. gingivalis Cat2 and C. beijerinckii Ald on the plasmid pZS*13. The products measured were 1,4-butanediol (BDO), pyruvate, 4-hydroxybutyrate (4HB), acetate, γ-butyrolactone (GBL) and ethanol.

[0059] FIG. 51 shows BDO production of two strains, ECKh-453 and ECKh-432. Both contain the plasmid pZS*13 expressing P. gingivalis Cat2 and C. beijerinckii Ald. The cultures were grown under microaerobic conditions, with the vessels punctured with 27 or 18 gauge needles, as indicated.

[0060] FIG. 52 shows the nucleotide sequence (SEQ ID NO:87) of the genomic DNA of strain ECKh-426 in the region of insertion of a polycistronic DNA fragment containing a promoter, sucCD gene, sucD gene, 4hbd gene and a terminator sequence.

[0061] FIG. 53 shows the nucleotide sequence (SEQ ID NO:88) of the chromosomal region of strain ECKh-432 in the region of insertion of a polycistronic sequence containing a promoter, sucA gene, C. kluyveri 4hbd gene and a terminator sequence.

[0062] FIG. 54 shows BDO synthesis from glucose in minimal medium in the ECKh-432 strain having upstream BDO pathway encoding genes integrated into the chromosome and containing a plasmid harboring downstream BDO pathway genes.

[0063] FIG. 55 shows a PCR product (SEQ ID NO:89) containing the non-phosphotransferase (non-PTS) sucrose utilization genes flanked by regions of homology to the rrnC region.

[0064] FIG. 56 shows a schematic diagram of the integrations site in the rrnC operon.

[0065] FIG. 57 shows average product concentration, normalized to culture OD600, after 48 hours of growth of strain ECKh-432 grown on glucose and strain ECKh-463 grown on sucrose. Both contain the plasmid pZS*13 expressing P. gingivalis Cat2 and C. beijerinckii Ald. The data is for 6 replicate cultures of each strain. The products measured were 1,4-butanediol (BDO), 4-hydroxybutyrate (4HB), γ-butyrolactone (GBL), pyruvate (PYR) and acetate (ACE) (left to right bars, respectively).

[0066] FIG. 58 shows exemplary pathways to 1,4-butanediol from succcinyl-CoA and alpha-ketoglutarate. Abbreviations: A) Succinyl-CoA reductase (aldehyde forming), B) Alpha-ketoglutarate decarboxylase, C) 4-Hydroxybutyrate dehydrogenase, D) 4-Hydroxybutyrate reductase, E) 1,4-Butanediol dehydrogenase.

[0067] FIG. 59A shows the nucleotide sequence (SEQ ID NO:90) of carboxylic acid reductase from Nocardia iowensis (GNM 720), and FIG. 59B shows the encoded amino acid sequence (SEQ ID NO:91).

[0068] FIG. 60A shows the nucleotide sequence (SEQ ID NO:92) of phosphpantetheine transferase, which was codon optimized, and FIG. 60B shows the encoded amino acid sequence (SEQ ID NO:93).

[0069] FIG. 61 shows a plasmid map of plasmid pZS*-13S-720 721opt.

[0070] FIGS. 62A and 62B show pathways to 1,4-butanediol from succinate, succcinyl-CoA, and alpha-ketoglutarate. Abbreviations: A) Succinyl-CoA reductase (aldehyde forming), B) Alpha-ketoglutarate decarboxylase, C) 4-Hydroxybutyrate dehydrogenase, D) 4-Hydroxybutyrate reductase, E) 1,4-Butanediol dehydrogenase, F) Succinate reductase, G) Succinyl-CoA transferase, H) Succinyl-CoA hydrolase, I) Succinyl-CoA synthetase (or Succinyl-CoA ligase), J) Glutamate dehydrogenase, K) Glutamate transaminase, L) Glutamate decarboxylase, M) 4-aminobutyrate dehydrogenase, N) 4-aminobutyrate transaminase, O) 4-Hydroxybutyrate kinase, P) Phosphotrans-4-hydroxybutyrylase, Q) 4-Hydroxybutyryl-CoA reductase (aldehyde forming), R) 4-hydroxybutyryl-phosphate reductase, S) Succinyl-CoA reductase (alcohol forming), T) 4-Hydroxybutyryl-CoA transferase, U) 4-Hydroxybutyryl-CoA hydrolase, V) 4-Hydroxybutyryl-CoA synthetase (or 4-Hydroxybutyryl-CoA ligase), W) 4-Hydroxybutyryl-CoA reductase (alcohol forming), X) Alpha-ketoglutarate reductase, Y) 5-Hydroxy-2-oxopentanoate dehydrogenase, Z) 5-Hydroxy-2-oxopentanoate decarboxylase, AA) 5-hydroxy-2-oxopentanoate dehydrogenase (decarboxylation).

[0071] FIG. 63 shows pathways to putrescine from succinate, succcinyl-CoA, and alpha-ketoglutarate. Abbreviations: A) Succinyl-CoA reductase (aldehyde forming), B) Alpha-ketoglutarate decarboxylase, C) 4-Aminobutyrate reductase, D) Putrescine dehydrogenase, E) Putrescine transaminase, F) Succinate reductase, G) Succinyl-CoA transferase, H) Succinyl-CoA hydrolase, I) Succinyl-CoA synthetase (or Succinyl-CoA ligase), J) Glutamate dehydrogenase, K) Glutamate transaminase, L) Glutamate decarboxylase, M) 4-Aminobutyrate dehydrogenase, N) 4-Aminobutyrate transaminase, O) Alpha-ketoglutarate reductase, P) 5-Amino-2-oxopentanoate dehydrogenase, Q) 5-Amino-2-oxopentanoate transaminase, R) 5-Amino-2-oxopentanoate decarboxylase, S) Omithine dehydrogenase, T) Ornithine transaminase, U) Ornithine decarboxylase.

[0072] FIG. 64A shows the nucleotide sequence (SEQ ID NO:94) of carboxylic acid reductase from Mycobacterium smegmatis mc(2)155 (designated 890), and FIG. 64B shows the encoded amino acid sequence (SEQ ID NO:95).

[0073] FIG. 65A shows the nucleotide sequence (SEQ ID NO:96) of carboxylic acid reductase from Mycobacterium avium subspecies paratuberculosis K-10 (designated 891), and FIG. 65B shows the encoded amino acid sequence (SEQ ID NO:97).

[0074] FIG. 66A shows the nucleotide sequence (SEQ ID NO:98) of carboxylic acid reductase from Mycobacterium marinum M (designated 892), and FIG. 66B shows the encoded amino acid sequence (SEQ ID NO:99).

[0075] FIG. 67 shows a schematic of the E. coli MG1655 chromosome between nucleotides 760928 and 765930.

[0076] FIGS. 68a-68e shows a schematic of the sequences and oligonucleotides used in the construction of the sucCD deletion.

[0077] FIG. 69 shows an exemplary BDO pathway. Enzyme names for each numbered step are as follows: (1) alpha-ketoglutarate decarboxylase; (2) CoA-dependent succinate semialdehyde dehydrogenase; (3) 4-hydroxybutyrate dehydrogenase; (4) 4-hydroxybutyryl-CoA transferase; (5) 4-hydroxybutyryl-CoA reductase; (6) 4-hydroxybutyraldehyde reductase.

[0078] FIG. 70 shows an exemplary pathway for the formation of BDO from glucose. Abbreviations: G6P-glucsoe-6-phosphate, PEP-phosphoenolpyruvate, PYR-pyruvate, OA-oxaloacetate, ACCOA-acetyl-CoA, CIT-citrate, ICIT-isocitrate, AKG-alpha-ketoglutarate, SUCCOA-succinyl-CoA, SUCSAL-succinate semialdehyde, 4HB-4-hydroxybutyrate, 4HBCoA-4-hydroxybutyryl-CoA, 4HBALD-4hydroxybutyraldehyde, BDO-1,4-butanediol, GBL-gamma-butyrolactone. Genes of interest: ppc-PEP carboxylase, sucCD-succinyl-CoA synthetase, sucAB-lpdA-subunits of the AKG dehydrogenase complex, ybgC, tesB-acyl-CoenzymeA thioesterases

[0079] FIG. 71 shows the average BDO and 4HB numbers from four replicates of a 4HB producing host strain that had the gene ppc overexpressed compared with the corresponding averages from four replicates of the control strain.

[0080] FIG. 72 shows the reduction in the average ethanol numbers from the four replicates of the strain that had ppc overexpressed and compared with those from the control.

[0081] FIG. 73 shows the average BDO and 4HB numbers from four replicates of a 4HB producing host strain that had the genes sucAB and mutant lpdA overexpressed on pZS*compared with the corresponding averages from four replicates of the control strain. ALD and ADH were expressed on the plasmid pPZSX23R.

[0082] FIG. 74 shows the reduction in the average glutamate numbers from the four replicates of the strain that had the genes sucAB and mutant lpdA overexpressed on pZS* and compared with those from the control.

[0083] FIG. 75 shows apparent equilibrium constant for lactonization of 4-HB to GBL as a function of pH (at 22° C.) (from Efe et al., Biotechnol. Bioeng. 99:1392-1406 (2008)).

[0084] FIG. 76 shows the average BDO and 4HB numbers from four replicates of a host strain capable of producing 4-hydrobutyryl-CoA that had the esterase integrated (2387) compared with the corresponding averages from four replicates of the control strain (2237).

[0085] FIG. 77 shows the average GBL numbers from four replicates of a host strain that had the esterase integrated (2387) compared with the corresponding averages from four replicates of the control strain (2237). Lower GBL was observed with the strains that had the esterase integrated.

[0086] FIG. 78 shows the average BDO and 4HB numbers from four replicates of a host strain that had the genes sucCD deleted (4269) compared with the corresponding averages from four replicates of the control strain (4070).

[0087] FIG. 79 shows the average BDO and 4HB numbers from three replicates of a host strain that had the genes ybgC and tesB deleted (1197) compared with the corresponding averages from three replicates of the control strain (1136).

[0088] FIG. 80 shows the average GBL numbers from three replicates of a host strain that had the genes ybgC and tesB deleted (1197) compared with the corresponding averages from three replicates of the control strain (1136).

[0089] FIG. 81 shows the profile for the anion exchange elution, backflux activity, as well as the SDS page for the fractions.

[0090] FIG. 82 shows the profile from the size exclusion chromatography, the backflux activity, as well as the SDS page for the fractions.

[0091] FIG. 83 shows backflux activity from the size exclusion column and the SDS page.

[0092] FIG. 84 shows the yjgB gene was cloned with a streptavidin tag, expressed and purified in order to characterize its properties. The results of the purification are via SDS-PAGE.

[0093] FIG. 85 shows yjgB activity in 100 mM BDO.

[0094] FIG. 86 shows the average BDO, 4HB and GBL numbers for the strain 1872 versus strain 1889.

[0095] FIG. 87 shows the average BDO, 4HB and GBL numbers for the strain 956 versus strain 879.

[0096] FIG. 88 shows the average BDO, 4HB and GBL numbers of the strains, 1889, 2424, 2611 and 2471.

[0097] FIG. 89A shows the nucleotide sequence of the Yersinia gene (locus yinte0001_{—}13710) (SEQ ID NO:177), and FIG. 89B shows the encoded amino acid sequence (SEQ ID NO:179).

[0098] FIG. 90A shows the nucleotide sequence of the gene from Agrobacterium tumefaciens (SEQ ID NO:178), and FIG. 90B shows the encoded amino acid sequence (SEQ ID NO:180).

### DETAILED DESCRIPTION OF THE INVENTION

[0099] The present invention is directed to the design and production of cells and organisms having biosynthetic production capabilities for 4-hydroxybutanoic acid (4-hydroxybutyrate, 4-HB), γ-butyrolactone, 1,4-butanediol (BDO), 4-hydroxybutanal (4-hydroxybutyraldehyde, 4-HBal), 4-hydroxybutyryl-CoA (4-HBCoA) and/or putrescine. The invention, in particular, relates to the design of microbial organisms capable of producing BDO, 4-HBal, 4-HBCoA and/or putrescine by introducing one or more nucleic acids encoding a BDO, 4-HBal, 4-HBCoA and/or putrescine pathway enzyme.

[0100] In one embodiment, the invention utilizes in silico stoichiometric models of Escherichia coli metabolism that identify metabolic designs for biosynthetic production of 4-hydroxybutanoic acid (4-HB), 1,4-butanediol (BDO), 4-HBal, 4-HBCoA and/or putrescine. The results described herein indicate that metabolic pathways can be designed and recombinantly engineered to achieve the biosynthesis of 4-HBal, 4-HBCoA or 4-HB and downstream products such as 1,4-butanediol or putrescine in Escherichia coli and other cells or organisms. Biosynthetic production of 4-HB, 4-HBal, 4-HBCoA, BDO and/or putrescine, for example, for the in silico designs can be confirmed by construction of strains having the designed metabolic genotype. These metabolically engineered cells or organisms also can be subjected to adaptive evolution to further augment 4-HB, 4-HBal, 4-HBCoA, BDO and/or putrescine biosynthesis, including under conditions approaching theoretical maximum growth.

[0101] In certain embodiments, the 4-HB, 4-HBal, 4-HBCoA, BDO and/or putrescine biosynthesis characteristics of the designed strains make them genetically stable and particularly useful in continuous bioprocesses. Separate strain design strategies were identified with incorporation of different non-native or heterologous reaction capabilities into E. coli or other host organisms leading to 4-HB and 1,4-butanediol producing metabolic pathways from either CoA-independent succinic semialdehyde dehydrogenase, succinyl-CoA synthetase and CoA-dependent succinic semialdehyde dehydrogenase, or glutamate:succinic semialdehyde transaminase. In silico metabolic designs were identified that resulted in the biosynthesis of 4-HB in both E. coli and yeast species from each of these metabolic pathways. The 1,4-butanediol intermediate γ-butyrolactone can be generated in culture by spontaneous cyclization under conditions at pH<7.5, particularly under acidic conditions, such as below pH 5.5, for example, pH<7, pH<6.5, pH<6, and particularly at pH<5.5 or lower.

[0102] Strains identified via the computational component of the platform can be put into actual production by genetically engineering any of the predicted metabolic alterations which lead to the biosynthetic production of 4-HB, 1,4-butanediol or other intermediate and/or downstream products. In yet a further embodiment, strains exhibiting biosynthetic production of these compounds can be further subjected to adaptive evolution to further augment product biosynthesis. The levels of product biosynthesis yield following adaptive evolution also can be predicted by the computational component of the system.

[0103] In other specific embodiments, microbial organisms were constructed to express a 4-HB biosynthetic pathway encoding the enzymatic steps from succinate to 4-HB and to 4-HB-CoA. Co-expression of succinate coenzyme A transferase, CoA-dependent succinic semialdehyde dehydrogenase, NAD-dependent 4-hydroxybutyrate dehydrogenase and 4-hydroxybutyrate coenzyme A transferase in a host microbial organism resulted in significant production of 4-HB compared to host microbial organisms lacking a 4-HB biosynthetic pathway. In a further specific embodiment, 4-HB-producing microbial organisms were generated that utilized α-ketoglutarate as a substrate by introducing nucleic acids encoding α-ketoglutarate decarboxylase and NAD-dependent 4-hydroxybutyrate dehydrogenase.

[0104] In another specific embodiment, microbial organisms containing a 1,4-butanediol (BDO) biosynthetic pathway were constructed that biosynthesized BDO when cultured in the presence of 4-HB. The BDO biosynthetic pathway consisted of a nucleic acid encoding either a multifunctional aldehyde/alcohol dehydrogenase or nucleic acids encoding an aldehyde dehydrogenawse and an alcohol dehydrogenase. To support growth on 4-HB substrates, these BDO-producing microbial organisms also expressed 4-hydroxybutyrate CoA transferase or 4-butyrate kinase in conjunction with phosphotranshydroxybutyrlase. In yet a further specific embodiment, microbial organisms were generated that synthesized BDO through exogenous expression of nucleic acids encoding a functional 4-HB biosynthetic pathway and a functional BDO biosynthetic pathway. The 4-HB biosynthetic pathway consisted of succinate coenzyme A transferase, CoA-dependent succinic semialdehyde dehydrogenase, NAD-dependent 4-hydroxybutyrate dehydrogenase and 4-hydroxybutyrate coenzyme A transferase. The BDO pathway consisted of a multifunctional aldehyde/alcohol dehydrogenase. Further described herein are additional pathways for production of BDO (see FIGS. 8-13).

[0105] In a further embodiment, described herein is the cloning and expression of a carboxylic acid reductase enzyme that functions in a 4-hydroxybutanal, 4-hydroxybutyryl-CoA or 1,4-butanediol metabolic pathway. Advantages of employing a carboxylic acid reductase as opposed to an acyl-CoA reductase to form 4-hydroxybutyraldehyde (4-hydroxybutanal) include lower ethanol and GBL byproduct formation accompanying the production of BDO. Also disclosed herein is the application of carboxylic acid reductase as part of additional numerous pathways to produce 1,4-butanediol and putrescine from the tricarboxylic acid (TCA) cycle metabolites, for example, succinate, succinyl-CoA, and/or alpha-ketoglutarate.

[0106] As used herein, the term “non-naturally occurring” when used in reference to a microbial organism or microorganism of the invention is intended to mean that the microbial organism has at least one genetic alteration not normally found in a naturally occurring strain of the referenced species, including wild-type strains of the referenced species. Genetic alterations include, for example, modifications introducing expressible nucleic acids encoding metabolic polypeptides, other nucleic acid additions, nucleic acid deletions and/or other functional disruption of the microbial organism's genetic material. Such modifications include, for example, coding regions and functional fragments thereof, for heterologous, homologous or both heterologous and homologous polypeptides for the referenced species. Additional modifications include, for example, non-coding regulatory regions in which the modifications alter expression of a gene or operon. Exemplary metabolic polypeptides include enzymes or proteins within a biosynthetic pathway for a 4-HB, 4-HBal, 4-HBCoA, BDO or putrescine family of compounds.

[0107] A metabolic modification refers to a biochemical reaction that is altered from its naturally occurring state. Therefore, non-naturally occurring microorganisms can have genetic modifications to nucleic acids encoding metabolic polypeptides or, functional fragments thereof. Exemplary metabolic modifications are disclosed herein.

[0108] As used herein, the term “isolated” when used in reference to a microbial organism is intended to mean an organism that is substantially free of at least one component as the referenced microbial organism is found in nature. The term includes a microbial organism that is removed from some or all components as it is found in its natural environment. The term also includes a microbial organism that is removed from some or all components as the microbial organism is found in non-naturally occurring environments. Therefore, an isolated microbial organism is partly or completely separated from other substances as it is found in nature or as it is grown, stored or subsisted in non-naturally occurring environments. Specific examples of isolated microbial organisms include partially pure microbes, substantially pure microbes and microbes cultured in a medium that is non-naturally occurring.

[0109] As used herein, the terms “microbial,” “microbial organism” or “microorganism” are intended to mean any organism that exists as a microscopic cell that is included within the domains of archaea, bacteria or eukarya. Therefore, the term is intended to encompass prokaryotic or eukaryotic cells or organisms having a microscopic size and includes bacteria, archaea and eubacteria of all species as well as eukaryotic microorganisms such as yeast and fungi. The term also includes cell cultures of any species that can be cultured for the production of a biochemical.

[0110] As used herein, the term “4-hydroxybutanoic acid” is intended to mean a 4-hydroxy derivative of butyric acid having the chemical formula C₄H₈O₃ and a molecular mass of 104.11 g/mol (126.09 g/mol for its sodium salt). The chemical compound 4-hydroxybutanoic acid also is known in the art as 4-HB, 4-hydroxybutyrate, gamma-hydroxybutyric acid or GHB. The term as it is used herein is intended to include any of the compound's various salt forms and include, for example, 4-hydroxybutanoate and 4-hydroxybutyrate. Specific examples of salt forms for 4-HB include sodium 4-HB and potassium 4-HB. Therefore, the terms 4-hydroxybutanoic acid, 4-HB, 4-hydroxybutyrate, 4-hydroxybutanoate, gamma-hydroxybutyric acid and GHB as well as other art recognized names are used synonymously herein.

[0111] As used herein, the term “monomeric” when used in reference to 4-HB is intended to mean 4-HB in a non-polymeric or underivatized form. Specific examples of polymeric 4-HB include poly-4-hydroxybutanoic acid and copolymers of, for example, 4-HB and 3-HB. A specific example of a derivatized form of 4-HB is 4-HB-CoA. Other polymeric 4-HB forms and other derivatized forms of 4-HB also are known in the art.

[0112] As used herein, the term “γ-butyrolactone” is intended to mean a lactone having the chemical formula C₄H₆O₂ and a molecular mass of 86.089 g/mol. The chemical compound γ-butyrolactone also is know in the art as GBL, butyrolactone, 1,4-lactone, 4-butyrolactone, 4-hydroxybutyric acid lactone, and gamma-hydroxybutyric acid lactone. The term as it is used herein is intended to include any of the compound's various salt forms.

[0113] As used herein, the term “1,4-butanediol” is intended to mean an alcohol derivative of the alkane butane, carrying two hydroxyl groups which has the chemical formula C₄H₁₀O₂ and a molecular mass of 90.12 g/mol. The chemical compound 1,4-butanediol also is known in the art as BDO and is a chemical intermediate or precursor for a family of compounds referred to herein as BDO family of compounds.

[0114] As used herein, the term “4-hydroxybutanal” is intended to mean an aledehyde having the chemical formula C₄H₈O₂ and a molecular mass of 88.10512 g/mol. The chemical compound 4-hydroxybutanal (4-HBal) is also known in the art as 4-hydroxybutyraldehyde.

[0115] As used herein, the term “putrescine” is intended to mean a diamine having the chemical formula C₄H₁₂N₂ and a molecular mass of 88.15148 g/mol. The chemical compound putrescine is also known in the art as 1,4-butanediamine, 1,4-diaminobutane, butylenediamine, tetramethylenediamine, tetramethyldiamine, and 1,4-butylenediamine.

[0116] As used herein, the term “tetrahydrofuran” is intended to mean a heterocyclic organic compound corresponding to the fully hydrogenated analog of the aromatic compound furan which has the chemical formula C₄H₈O and a molecular mass of 72.11 g/mol. The chemical compound tetrahydrofuran also is known in the art as THF, tetrahydrofuran, 1,4-epoxybutane, butylene oxide, cyclotetramethylene oxide, oxacyclopentane, diethylene oxide, oxolane, furanidine, hydrofuran, tetra-methylene oxide. The term as it is used herein is intended to include any of the compound's various salt forms.

[0117] As used herein, the term “CoA” or “coenzyme A” is intended to mean an organic cofactor or prosthetic group (nonprotein portion of an enzyme) whose presence is required for the activity of many enzymes (the apoenzyme) to form an active enzyme system. Coenzyme A functions in certain condensing enzymes, acts in acetyl or other acyl group transfer and in fatty acid synthesis and oxidation, pyruvate oxidation and in other acetylation.

[0118] As used herein, the term “substantially anaerobic” when used in reference to a culture or growth condition is intended to mean that the amount of oxygen is less than about 10% of saturation for dissolved oxygen in liquid media. The term also is intended to include sealed chambers of liquid or solid medium maintained with an atmosphere of less than about 1% oxygen.

[0119] The non-naturally occurring microbal organisms of the invention can contain stable genetic alterations, which refers to microorganisms that can be cultured for greater than five generations without loss of the alteration. Generally, stable genetic alterations include modifications that persist greater than 10 generations, particularly stable modifications will persist more than about 25 generations, and more particularly, stable genetic modifications will be greater than 50 generations, including indefinitely.

[0120] In the case of gene disruptions, a particularly useful stable genetic alteration is a gene deletion. The use of a gene deletion to introduce a stable genetic alteration is particularly useful to reduce the likelihood of a reversion to a phenotype prior to the genetic alteration. For example, if desired, stable growth-coupled production of a biochemical can be achieved, for example, by deletion of a gene encoding an enzyme catalyzing one or more reactions within a set of metabolic modifications. The stability of growth-coupled production of a biochemical can be further enhanced through multiple deletions, significantly reducing the likelihood of multiple compensatory reversions occurring for each disrupted activity.

[0121] Those skilled in the art will understand that the genetic alterations, including metabolic modifications exemplified herein are described with reference to a suitable source or host organism such as E. coli, yeast, or other organisms disclosed herein and their corresponding metabolic reactions or a suitable source organism for desired genetic material such as genes encoding enzymes for their corresponding metabolic reactions for a desired metabolic pathway. However, given the complete genome sequencing of a wide variety of organisms and the high level of skill in the area of genomics, those skilled in the art will readily be able to apply the teachings and guidance provided herein to essentially all other organisms. For example, the E. coli metabolic alterations exemplified herein can readily be applied to other species by incorporating the same or analogous encoding nucleic acid from species other than the referenced species. Such genetic alterations include, for example, genetic alterations of species homologs, in general, and in particular, orthologs, paralogs or nonorthologous gene displacements.

[0122] An ortholog is a gene or genes that are related by vertical descent and are responsible for substantially the same or identical functions in different organisms. For example, mouse epoxide hydrolase and human epoxide hydrolase can be considered orthologs for the biological function of hydrolysis of epoxides. Genes are related by vertical descent when, for example, they share sequence similarity of sufficient amount to indicate they are homologous, or related by evolution from a common ancestor. Genes can also be considered orthologs if they share three-dimensional structure but not necessarily sequence similarity, of a sufficient amount to indicate that they have evolved from a common ancestor to the extent that the primary sequence similarity is not identifiable. Genes that are orthologous can encode proteins with sequence similarity of about 25% to 100% amino acid sequence identity. Genes encoding proteins sharing an amino acid similarity less that 25% can also be considered to have arisen by vertical descent if their three-dimensional structure also shows similarities. Members of the serine protease family of enzymes, including tissue plasminogen activator and elastase, are considered to have arisen by vertical descent from a common ancestor.

[0123] Orthologs include genes or their encoded gene products that through, for example, evolution, have diverged in structure or overall activity. For example, where one species encodes a gene product exhibiting two functions and where such functions have been separated into distinct genes in a second species, the three genes and their corresponding products are considered to be orthologs. For the production, including growth-coupled production, of a biochemical product, those skilled in the art will understand that the orthologous gene harboring the metabolic activity to be introduced or disrupted is to be chosen for construction of the non-naturally occurring microorganism. An example of orthologs exhibiting separable activities is where distinct activities have been separated into distinct gene products between two or more species or within a single species. A specific example is the separation of elastase proteolysis and plasminogen proteolysis, two types of seine protease activity, into distinct molecules as plasminogen activator and elastase. A second example is the separation of mycoplasma 5′-3′ exonuclease and Drosophila DNA polymerase III activity. The DNA polymerase from the first species can be considered an ortholog to either or both of the exonuclease or the polymerase from the second species and vice versa.

[0124] In contrast, paralogs are homologs related by, for example, duplication followed by evolutionary divergence and have similar or common, but not identical functions. Paralogs can originate or derive from, for example, the same species or from a different species. For example, microsomal epoxide hydrolase (epoxide hydrolase I) and soluble epoxide hydrolase (epoxide hydrolase II) can be considered paralogs because they represent two distinct enzymes, co-evolved from a common ancestor, that catalyze distinct reactions and have distinct functions in the same species. Paralogs are proteins from the same species with significant sequence similarity to each other suggesting that they are homologous, or related through co-evolution from a common ancestor. Groups of paralogous protein families include HipA homologs, luciferase genes, peptidases, and others.

[0125] A nonorthologous gene displacement is a nonorthologous gene from one species that can substitute for a referenced gene function in a different species. Substitution includes, for example, being able to perform substantially the same or a similar function in the species of origin compared to the referenced function in the different species. Although generally, a nonorthologous gene displacement will be identifiable as structurally related to a known gene encoding the referenced function, less structurally related but functionally similar genes and their corresponding gene products nevertheless will still fall within the meaning of the term as it is used herein. Functional similarity requires, for example, at least some structural similarity in the active site or binding region of a nonorthologous gene product compared to a gene encoding the function sought to be substituted. Therefore, a nonorthologous gene includes, for example, a paralog or an unrelated gene.

[0126] Therefore, in identifying and constructing the non-naturally occurring microbial organisms of the invention having 4-HB, GBL, 4-HBal, 4-HBCoA, BDO and/or putrescine biosynthetic capability, those skilled in the art will understand with applying the teaching and guidance provided herein to a particular species that the identification of metabolic modifications can include identification and inclusion or inactivation of orthologs. To the extent that paralogs and/or nonorthologous gene displacements are present in the referenced microorganism that encode an enzyme catalyzing a similar or substantially similar metabolic reaction, those skilled in the art also can utilize these evolutionally related genes. Similarly for a gene disruption, evolutionally related genes can also be disrupted or deleted in a host microbial organism to reduce or eliminate functional redundancy of enzymatic activities targeted for disruption.

[0127] Orthologs, paralogs and nonorthologous gene displacements can be determined by methods well known to those skilled in the art. For example, inspection of nucleic acid or amino acid sequences for two polypeptides will reveal sequence identity and similarities between the compared sequences. Based on such similarities, one skilled in the art can determine if the similarity is sufficiently high to indicate the proteins are related through evolution from a common ancestor. Algorithms well known to those skilled in the art, such as Align, BLAST, Clustal W and others compare and determine a raw sequence similarity or identity, and also determine the presence or significance of gaps in the sequence which can be assigned a weight or score. Such algorithms also are known in the art and are similarly applicable for determining nucleotide sequence similarity or identity. Parameters for sufficient similarity to determine relatedness are computed based on well known methods for calculating statistical similarity, or the chance of finding a similar match in a random polypeptide, and the significance of the match determined. A computer comparison of two or more sequences can, if desired, also be optimized visually by those skilled in the art. Related gene products or proteins can be expected to have a high similarity, for example, 25% to 100% sequence identity. Proteins that are unrelated can have an identity which is essentially the same as would be expected to occur by chance, if a database of sufficient size is scanned (about 5%). Sequences between 5% and 24% may or may not represent sufficient homology to conclude that the compared sequences are related. Additional statistical analysis to determine the significance of such matches given the size of the data set can be carried out to determine the relevance of these sequences.

[0128] Exemplary parameters for determining relatedness of two or more sequences using the BLAST algorithm, for example, can be as set forth below. Briefly, amino acid sequence alignments can be performed using BLASTP version 2.0.8 (Jan. 5, 1999) and the following parameters: Matrix: 0 BLOSUM62; gap open: 11; gap extension: 1; x_dropoff 50; expect: 10.0; wordsize: 3; filter: on. Nucleic acid sequence alignments can be performed using BLASTN version 2.0.6 (Sep. 16, 1998) and the following parameters: Match: 1; mismatch: −2; gap open: 5; gap extension: 2; x_dropoff 50; expect: 10.0; wordsize: 11; filter: off. Those skilled in the art will know what modifications can be made to the above parameters to either increase or decrease the stringency of the comparison, for example, and determine the relatedness of two or more sequences.

[0129] “Conservative amino acid substitution” or, simply, “conservative variations” of a particular sequence refers to the replacement of one amino acid, or series of amino acids, with essentially identical amino acid sequences. One of skill will recognize that individual substitutions, deletions or additions that alter, add or delete a single amino acid or a percentage of amino acids in an encoded sequence result in “conservative variations” where the alterations result in the deletion of an amino acid, addition of an amino acid, or substitution of an amino acid with a functionally similar amino acid. One of skill in the art will also recognize that an individual substitution, deletion or addition disclosed herein that refers to a specific variant, e.g. substitution of a Glycine a residue 34 with a Histidine (G34H), can include a conservative substitution made at the same residue as disclosed herein, e.g. instead of a Histindine being substituted at residue 34, an Arginine (R) or a Lysine (K) can be substituted.

[0130] Conservative substitution tables providing functionally similar amino acids are well known in the art. Conservative amino acid substitutions includes replacement of one amino acid with another having the same type of functional group or side chain polarity, size, shape or charge (e.g., aliphatic, aromatic, positively charged, negatively charged, polar, non-polar, positive polar, negative polar, uncharged polar, non-polar hydrophobic, ionizable acidic, ionizable basic, or sulfur containing residues).

[0131] As a non-limiting example, the following six groups each contain amino acids that can be conservative substitutions for one another:

[0132] 1) Alanine (A), Serine (S), Threonine (T);

[0133] 2) Aspartic acid (D), Glutamic acid (E);

[0134] 3) Asparagine (N), Glutamine (Q);

[0135] 4) Arginine (R), Lysine (K); Histidine (H);

[0136] 5) Isoleucine (I), Leucine (L), Methionine (M), Valine (V); and

[0137] 6) Phenylalanine (F), Tyrosine (Y), Tryptophan (W).

[0138] Thus, conservative amino acid substitutions of a polypeptide sequence disclosed herein can include substitutions of a percentage, such as less than 1%, 5% or 10%, of the amino acids of the polypeptide sequence, with a conservatively selected amino acid of the same conservative substitution group. Additionally, a conservatively substituted variation of a polypeptide sequence disclosed herein can contain no more than 1, 2, 3, 4, 5, 10, 20, 30, 50, or 100 substitutions with a conservatively substituted variation of the same conservative substitution group.

[0139] It is also understood that the addition or substitution of nucleic acid sequences which do not alter the encoded polypeptide activity of a nucleic acid molecule, such as the addition of a non-functional or non-coding sequence, is a conservative variation of the nucleic acid sequence. One of skill in the art will appreciate that many conservative variations of the nucleic acid molecules disclosed yield a functionally identical polypeptide. For example, owing to the degeneracy of the genetic code, silent substitutions (i.e., substitutions in a nucleic acid sequence which do not result in an alteration in an encoded polypeptide) are an implied feature of every nucleic acid sequence which encodes an amino acid. Similarly, conservative amino acid substitutions, in one or more amino acids in an amino acid sequence can be substituted with different amino acids with highly similar properties, are also readily identified as being highly similar to a disclosed construct. Such conservative variations of each disclosed sequence are a feature of the polypeptides disclosed herein.

[0140] Non-conservative modifications of a particular polypeptide are those which substitute any amino acid not characterized as a conservative substitution. For example, any substitution which crosses the bounds of the six groups set forth above. These include substitutions of basic or acidic amino acids for neutral amino acids (e.g., Aspartic acid (D), Glutamic acid (E), Asparagine (N), or Glutamine (Q) for Valine (V), Isoleucine (I), Leucine (L) or Methionine (M)), aromatic amino acid for basic or acidic amino acids (e.g., Phenylalanine (F), Tyrosine (Y) or Tryptophan (W) for Aspartic acid (D), Asparagine (N), Glutamic acid (E) or Glutamine (Q)), or any other substitution not replacing an amino acid with a like amino acid.

[0141] Disclosed herein are non-naturally occurring microbial biocatalyst or microbial organisms including a microbial organism having a 4-hydroxybutanoic acid (4-HB) biosynthetic pathway that includes at least one exogenous nucleic acid encoding 4-hydroxybutanoate dehydrogenase, CoA-independent succinic semialdehyde dehydrogenase, succinyl-CoA synthetase, CoA-dependent succinic semialdehyde dehydrogenase, glutamate:succinic semialdehyde transaminase, alpha-ketoglutarate decarboxylase, or glutamate decarboxylase, wherein the exogenous nucleic acid is expressed in sufficient amounts to produce monomeric 4-hydroxybutanoic acid (4-HB). 4-hydroxybutanoate dehydrogenase is also referred to as 4-hydroxybutyrate dehydrogenase or 4-HB dehydrogenase. Succinyl-CoA synthetase is also referred to as succinyl-CoA synthase or succinyl-CoA ligase.

[0142] Also disclosed herein is a non-naturally occurring microbial biocatalyst or microbial organism including a microbial organism having a 4-hydroxybutanoic acid (4-HB) biosynthetic pathway having at least one exogenous nucleic acid encoding 4-hydroxybutanoate dehydrogenase, succinyl-CoA synthetase, CoA-dependent succinic semialdehyde dehydrogenase, or α-ketoglutarate decarboxylase, wherein the exogenous nucleic acid is expressed in sufficient amounts to produce monomeric 4-hydroxybutanoic acid (4-HB).

[0143] The non-naturally occurring microbial biocatalysts or microbial organisms can include microbial organisms that employ combinations of metabolic reactions for biosynthetically producing the compounds of the invention. The biosynthesized compounds can be produced intracellularly and/or secreted into the culture medium. Exemplary compounds produced by the non-naturally occurring microorganisms include, for example, 4-hydroxybutanoic acid, 1,4-butanediol and γ-butyrolactone.

[0144] In one embodiment, a non-naturally occurring microbial organism is engineered to produce 4-HB. This compound is one useful entry point into the 1,4-butanediol family of compounds. The biochemical reactions for formation of 4-HB from succinate, from succinate through succinyl-CoA or from α-ketoglutarate are shown in steps 1-8 of FIG. 1.

[0145] It is understood that any combination of appropriate enzymes of a BDO, 4-HB, 4-HBal, 4-HBCoA and/or putrescine pathway can be used so long as conversion from a starting component to the BDO, 4-HBal, 4-HBCoA and/or putrescine product is achieved. Thus, it is understood that any of the metabolic pathways disclosed herein can be utilized and that it is well understood to those skilled in the art how to select appropriate enzymes to achieve a desired pathway, as disclosed herein.

[0146] In another embodiment, disclosed herein is a non-naturally occurring microbial organism, comprising a microbial organism having a 1,4-butanediol (BDO) pathway comprising at least one exogenous nucleic acid encoding a BDO pathway enzyme expressed in a sufficient amount to produce BDO, the BDO pathway comprising 4-aminobutyrate CoA transferase, 4-aminobutyryl-CoA hydrolase, 4-aminobutyrate-CoA ligase, 4-aminobutyryl-CoA oxidoreductase (deaminating), 4-aminobutyryl-CoA transaminase, or 4-hydroxybutyryl-CoA dehydrogenase (see Example VII; see corresponding Example and Table 17 in WO2013/184602). The BDO pathway further can comprise 4-hydroxybutyryl-CoA reductase (alcohol forming), 4-hydroxybutyryl-CoA reductase, or 1,4-butanediol dehydrogenase.

[0147] It is understood by those skilled in the art that various combinations of the pathways can be utilized, as disclosed herein. For example, in a non-naturally occurring microbial organism, the nucleic acids can encode 4-aminobutyrate CoA transferase, 4-aminobutyryl-CoA hydrolase, or 4-aminobutyrate-CoA ligase; 4-aminobutyryl-CoA oxidoreductase (deaminating) or 4-aminobutyryl-CoA transaminase; and 4-hydroxybutyryl-CoA dehydrogenase. Other exemplary combinations are specifically describe below and further can be found in FIGS. 8-13. For example, the BDO pathway can further comprise 4-hydroxybutyryl-CoA reductase (alcohol forming), 4-hydroxybutyryl-CoA reductase, or 1,4-butanediol dehydrogenase.

[0148] Additionally disclosed herein is a non-naturally occurring microbial organism, comprising a microbial organism having a BDO pathway comprising at least one exogenous nucleic acid encoding a BDO pathway enzyme expressed in a sufficient amount to produce BDO, the BDO pathway comprising 4-aminobutyrate CoA transferase, 4-aminobutyryl-CoA hydrolase, 4-aminobutyrate-CoA ligase, 4-aminobutyryl-CoA reductase (alcohol forming), 4-aminobutyryl-CoA reductase, 4-aminobutan-1-ol dehydrogenase, 4-aminobutan-1-ol oxidoreductase (deaminating) or 4-aminobutan-1-ol transaminase (see Example VII; see corresponding Example and Table 18 in WO2013/184602), and can further comprise 1,4-butanediol dehydrogenase. For example, the exogenous nucleic acids can encode 4-aminobutyrate CoA transferase, 4-aminobutyryl-CoA hydrolase, or 4-aminobutyrate-CoA ligase; 4-aminobutyryl-CoA reductase (alcohol forming); and 4-aminobutan-1-ol oxidoreductase (deaminating) or 4-aminobutan-1-ol transaminase. In addition, the nucleic acids can encode. 4-aminobutyrate CoA transferase, 4-aminobutyryl-CoA hydrolase, or 4-aminobutyrate-CoA ligase; 4-aminobutyryl-CoA reductase; 4-aminobutan-1-ol dehydrogenase; and 4-aminobutan-1-ol oxidoreductase (deaminating) or 4-aminobutan-1-ol transaminase.

[0149] Also disclosed herein is a non-naturally occurring microbial organism, comprising a microbial organism having a BDO pathway comprising at least one exogenous nucleic acid encoding a BDO pathway enzyme expressed in a sufficient amount to produce BDO, the BDO pathway comprising 4-aminobutyrate kinase, 4-aminobutyraldehyde dehydrogenase (phosphorylating), 4-aminobutan-1-ol dehydrogenase, 4-aminobutan-1-ol oxidoreductase (deaminating), 4-aminobutan-1-ol transaminase, [(4-aminobutanolyl)oxy]phosphonic acid oxidoreductase (deaminating), [(4-aminobutanolyl)oxy]phosphonic acid transaminase, 4-hydroxybutyryl-phosphate dehydrogenase, or 4-hydroxybutyraldehyde dehydrogenase (phosphorylating) (see Example VII; see corresponding Example and Table 19 in WO2013/184602). For example, the exogenous nucleic acids can encode 4-aminobutyrate kinase; 4-aminobutyraldehyde dehydrogenase (phosphorylating); 4-aminobutan-1-ol dehydrogenase; and 4-aminobutan-1-ol oxidoreductase (deaminating) or 4-aminobutan-1-ol transaminase. Alternatively, the exogenous nucleic acids can encode 4-aminobutyrate kinase; [(4-aminobutanolyl)oxy]phosphonic acid oxidoreductase (deaminating) or [(4-aminobutanolyl)oxy]phosphonic acid transaminase; 4-hydroxybutyryl-phosphate dehydrogenase; and 4-hydroxybutyraldehyde dehydrogenase (phosphorylating).

[0150] Additionally disclosed herein is a non-naturally occurring microbial organism, comprising a microbial organism having a BDO pathway comprising at least one exogenous nucleic acid encoding a BDO pathway enzyme expressed in a sufficient amount to produce BDO, the BDO pathway comprising alpha-ketoglutarate 5-kinase, 2,5-dioxopentanoic semialdehyde dehydrogenase (phosphorylating), 2,5-dioxopentanoic acid reductase, alpha-ketoglutarate CoA transferase, alpha-ketoglutaryl-CoA hydrolase, alpha-ketoglutaryl-CoA ligase, alpha-ketoglutaryl-CoA reductase, 5-hydroxy-2-oxopentanoic acid dehydrogenase, alpha-ketoglutaryl-CoA reductase (alcohol forming), 5-hydroxy-2-oxopentanoic acid decarboxylase, or 5-hydroxy-2-oxopentanoic acid dehydrogenase (decarboxylation) (see Example VIII; see corresponding Example and Table 20 in WO2013/184602). The BDO pathway can further comprise 4-hydroxybutyryl-CoA reductase (alcohol forming), 4-hydroxybutyryl-CoA reductase, or 1,4-butanediol dehydrogenase.

[0151] Further disclosed herein is a non-naturally occurring microbial organism, comprising a microbial organism having a BDO pathway comprising at least one exogenous nucleic acid encoding a BDO pathway enzyme expressed in a sufficient amount to produce BDO, the BDO pathway comprising glutamate CoA transferase, glutamyl-CoA hydrolase, glutamyl-CoA ligase, glutamate 5-kinase, glutamate-5-semialdehyde dehydrogenase (phosphorylating), glutamyl-CoA reductase, glutamate-5-semialdehyde reductase, glutamyl-CoA reductase (alcohol forming), 2-amino-5-hydroxypentanoic acid oxidoreductase (deaminating), 2-amino-5-hydroxypentanoic acid transaminase, 5-hydroxy-2-oxopentanoic acid decarboxylase, 5-hydroxy-2-oxopentanoic acid dehydrogenase (decarboxylation) (see Example IX; see corresponding Example and Table 21 in WO2013/184602).

[0152] Also disclosed herein is a non-naturally occurring microbial organism, comprising a microbial organism having a BDO pathway comprising at least one exogenous nucleic acid encoding a BDO pathway enzyme expressed in a sufficient amount to produce BDO, the BDO pathway comprising 3-hydroxybutyryl-CoA dehydrogenase, 3-hydroxybutyryl-CoA dehydratase, vinylacetyl-CoAΔ-isomerase, or 4-hydroxybutyryl-CoA dehydratase (see Example X; see corresponding Example and Table 22 in WO2013/184602). For example, the exogenous nucleic acids can encode 3-hydroxybutyryl-CoA dehydrogenase; 3-hydroxybutyryl-CoA dehydratase; vinylacetyl-CoAΔ-isomerase; and 4-hydroxybutyryl-CoA dehydratase.

[0153] Further disclosed herein is a non-naturally occurring microbial organism, comprising a microbial organism having a BDO pathway comprising at least one exogenous nucleic acid encoding a BDO pathway enzyme expressed in a sufficient amount to produce BDO, the BDO pathway comprising homoserine deaminase, homoserine CoA transferase, homoserine-CoA hydrolase, homoserine-CoA ligase, homoserine-CoA deaminase, 4-hydroxybut-2-enoyl-CoA transferase, 4-hydroxybut-2-enoyl-CoA hydrolase, 4-hydroxybut-2-enoyl-CoA ligase, 4-hydroxybut-2-enoate reductase, 4-hydroxybutyryl-CoA transferase, 4-hydroxybutyryl-CoA hydrolase, 4-hydroxybutyryl-CoA ligase, or 4-hydroxybut-2-enoyl-CoA reductase (see Example XI; see corresponding Example and Table 23 in WO2013/184602).

[0154] Further disclosed herein is a non-naturally occurring microbial organism, comprising a microbial organism having a BDO pathway comprising at least one exogenous nucleic acid encoding a BDO pathway enzyme expressed in a sufficient amount to produce BOD, the BDO pathway comprising succinyl-CoA reductase (alcohol forming), 4-hydroxybutyryl-CoA hydrolase, 4-hydroxybutyryl-CoA ligase, 4-hydroxybutanal dehydrogenase (phosphorylating) (see Table 15). Such a BDO pathway can further comprise succinyl-CoA reductase, 4-hydroxybutyrate dehydrogenase, 4-hydroxybutyryl-CoA transferase, 4-hydroxybutyrate kinase, phosphotrans-4-hydroxybutyrylase, 4-hydroxybutyryl-CoA reductase, 4-hydroxybutyryl-CoA reductase (alcohol forming), or 1,4-butanediol dehydrogenase.

[0155] Additionally disclosed herein is a non-naturally occurring microbial organism, comprising a microbial organism having a BDO pathway comprising at least one exogenous nucleic acid encoding a BDO pathway enzyme expressed in a sufficient amount to produce BDO, the BDO pathway comprising glutamate dehydrogenase, 4-aminobutyrate oxidoreductase (deaminating), 4-aminobutyrate transaminase, glutamate decarboxylase, 4-hydroxybutyryl-CoA hydrolase, 4-hydroxybutyryl-CoA ligase, 4-hydroxybutanal dehydrogenase (phosphorylating)(see Table 16). Such a BDO pathway can further comprise alpha-ketoglutarate decarboxylase, 4-hydroxybutyrate dehydrogenase, 4-hydroxybutyryl-CoA transferase, 4-hydroxybutyrate kinase, phosphotrans-4-hydroxybutyrylase, 4-hydroxybutyryl-CoA reductase, 4-hydroxybutyryl-CoA reductase (alcohol forming), or 1,4-butanediol dehydrogenase.

[0156] The pathways described above are merely exemplary. One skilled in the art can readily select appropriate pathways from those disclosed herein to obtain a suitable BDO pathway or other metabolic pathway, as desired.

[0157] The invention provides genetically modified organisms that allow improved production of a desired product such as BDO by increasing the product or decreasing undesirable byproducts. As disclosed herein, the invention provides a non-naturally occurring microbial organism, comprising a microbial organism having a 1,4-butanediol (BDO) pathway comprising at least one exogenous nucleic acid encoding a BDO pathway enzyme expressed in a sufficient amount to produce BDO. In one embodiment, the microbial organism is genetically modified to express exogenous succinyl-CoA synthetase (see Example I). For example, the succinyl-CoA synthetase can be encoded by an Escherichia coli sucCD genes.

[0158] In another embodiment, the microbial organism is genetically modified to express exogenous alpha-ketoglutarate decarboxylase (see Example XIII). For example, the alpha-ketoglutarate decarboxylase can be encoded by the Mycobacterium bovis sucA gene. In still another embodiment, the microbial organism is genetically modified to express exogenous succinate semialdehyde dehydrogenase and 4-hydroxybutyrate dehydrogenase and optionally 4-hydroxybutyryl-CoA/acetyl-CoA transferase (see Example XIII). For example, the succinate semialdehyde dehydrogenase (CoA-dependent), 4-hydroxybutyrate dehydrogenase and 4-hydroxybutyryl-CoA/acetyl-CoA transferase can be encoded by Porphyromonas gingivalis W83 genes. In an additional embodiment, the microbial organism is genetically modified to express exogenous butyrate kinase and phosphotransbutyrylase (see Example XIII). For example, the butyrate kinase and phosphotransbutyrylase can be encoded by Clostridium acetobutilicum buk1 and ptb genes.

[0159] In yet another embodiment, the microbial organism is genetically modified to express exogenous 4-hydroxybutyryl-CoA reductase (see Example XIII). For example, the 4-hydroxybutyryl-CoA reductase can be encoded by Clostridium beijerinckii ald gene. Additionally, in an embodiment of the invention, the microbial organism is genetically modified to express exogenous 4-hydroxybutanal reductase (see Example XIII). For example, the 4-hydroxybutanal reductase can be encoded by Geobacillus thermoglucosidasius adh1 gene. In another embodiment, the microbial organism is genetically modified to express exogenous pyruvate dehydrogenase subunits (see Example XIV). For example, the exogenous pyruvate dehydrogenase can be NADH insensitive. The pyruvate dehydrogenase subunit can be encoded by the Klebsiella pneumonia lpdA gene. In a particular embodiment, the pyruvate dehydrogenase subunit genes of the microbial organism can be under the control of a pyruvate formate lyase promoter.

[0160] In still another embodiment, the microbial organism is genetically modified to disrupt a gene encoding an aerobic respiratory control regulatory system (see Example XV). For example, the disruption can be of the arcA gene. Such an organism can further comprise disruption of a gene encoding malate dehydrogenase. In a further embodiment, the microbial organism is genetically modified to express an exogenous NADH insensitive citrate synthase (see Example XV). For example, the NADH insensitive citrate synthase can be encoded by gltA, such as an R163L mutant of gltA. In still another embodiment, the microbial organism is genetically modified to express exogenous phosphoenolpyruvate carboxykinase (see Example XVI). For example, the phosphoenolpyruvate carboxykinase can be encoded by an Haemophilus influenza phosphoenolpyruvate carboxykinase gene.

[0161] In an additional embodiment, the invention provides a non-naturally occurring microbial organism having a 4-hydroxybutyrate pathway and being capable of producing 4-hydroxybutyrate, wherein the microbial organism comprises a genetic modification that increases expression of phosphoenolpyruvate carboxylase (see Example XXXI). In such an embodiment in which phosphoenolpyruvate expression is increased, the microbial organism can exhibit decreased production of ethanol, acetate, pyruvate or alanine, or a combination thereof, relative to a parent microbial organism in the absence of the genetic modification. As disclosed herein, the overexpression of posphoenolpyruvate (PEP) carboxylase leads to conversion of more phosphoenolpyruvate into oxaloacetate, thereby reducing flux from PEP into pyruvate and subsequently into acetyl-CoA (Example XXXI). Reducing flux from PEP to pyruvate and acetyl-CoA increases flux into the TCA cycle and consequently a 4HB or BDO pathway.

[0162] In yet another embodiment, the invention provides a non-naturally occurring microbial organism having a 4-hydroxybutyrate pathway and being capable of producing 4-hydroxybutyrate, wherein the microbial organism comprises a genetic modification that increases expression of alpha-ketoglutarate dehydrogenase (see Example XXXII). The increased expression of alpha-ketoglutarate dehydrogenase can result in decreased production of glutamate relative to a parent microbial organism in the absence of the genetic modification. Such a microbial organism can also exhibit decreased production of ethanol, acetate, pyruvate or alanine, or a combination thereof, relative to a parent microbial organism in the absence of the genetic modification. As disclosed herein, the formation of glutamate can lead to a carbon loss and reduction in yield. Therefore, increased expression of alpha-ketoglutarate dehydrogenase can reduce glutamate as well as other by-products such as ethanol, acetate, alanine and/or pyruvate.

[0163] In a further embodiment, the invention provides a non-naturally occurring microbial organism having a 4-hydroxybutyrate pathway and being capable of producing 4-hydroxybutyrate, wherein the microbial organism comprises a genetic modification that increases expression of a non-phosphotransferase (PTS) glucose uptake system (see Example XXXIII). In such an embodiment, the genetic modification can comprise increased expression of a permease, glucokinase, or a glucose facilitator, or a combination thereof. In addition, such a microbial organism can exhibit decreased production of ethanol, acetate, pyruvate, or alanine, or a combination thereof, relative to a parent microbial organism in the absence of the genetic modification. The introduction of a non-PTS sucrose uptake system has been previously described in U.S. publication 2011/0045575 as a way to reduce pyruvate formation in a microbial organism utilizing sucrose as a carbon source. In contrast, the utilization of a non-PTS glucose uptake system, as described herein, is to provide a better balance between the available oxaloacetate in comparison to acetyl-CoA (see Example XXXIII).

[0164] In another embodiment, the invention provides a non-naturally occurring microbial organism having a 4-hydroxybutyrate pathway and being capable of producing 4-hydroxybutyrate, wherein the microbial organism comprises a genetic modification that increases expression of a gamma-butyrolactone esterase (Example XXXIV). Such a microbial organism can exhibit decreased production of gamma-butyrolactone relative to a parent microbial organism in the absence of the genetic modification. As disclosed herein, gamma-butyrolactone is a byproduct formed during the fermentation of sugars to 1,4-butanediol. Gamma-butyrolactone can form from the unstable pathway intermediate 4-hydroxybutyryl-CoA as well as spontaneous lactonization of 4-hydroxybutyrate. As disclosed herein, the expression of a gamma-butyrolactone can accelerate the hydrolysis of gamma-butyrolactone to BDO, thereby improving BDO product yield and eliminating a byproduct (see Example XXXIV).

[0165] In additional embodiments disclosed herein, a genetic modification can include gene disruptions or deletions to decrease expression of an enzyme. For example, in a further embodiment, the invention provides a non-naturally occurring microbial organism having a 4-hydroxybutyrate pathway and being capable of producing 4-hydroxybutyrate, wherein the microbial organism comprises a genetic modification that decreases expression of succinyl-CoA synthetase (Example XXXV). In such an embodiment, the microbial organism can exhibit increased production of 4-hydroxybutyrate relative to a parent microbial organism in the absence of the genetic modification. As described herein, repeated rounds of flux through the TCA cycle results in carbon loss as CO₂. The deletion of succinyl-CoA synthetase blocks the TCA cycle downstream of succinyl-CoA, thereby reducing CO₂ loss (see Example XXXV).

[0166] In a further embodiment, the invention provides a non-naturally occurring microbial organism having a 4-hydroxybutyrate pathway and being capable of producing 4-hydroxybutyrate, wherein the microbial organism comprises a genetic modification that decreases expression of an acyl coenzyme A thioesterase (see Example XXXVI). In such an embodiment the microbial organism can exhibit decreased production of gamma-butyrolactone relative to a parent microbial organism in the absence of the genetic modification. In yet a further embodiment, such a microbial organism can comprise at least two genetic modifications that decrease expression of at least two acyl coenzyme A thioesterases. As disclosed herein, the BDO pathway intermediate 4-hydroxybutyryl-CoA spontaneously and enzymatically cyclizes to form gamma-butyrolactone (GBL). By deleting acyl coenzyme-A thioesterases, the formation of the byproduct GBL was reduced (see Example XXXVI).

[0167] In another embodiment, the invention provides a non-naturally occurring microbial organism having a 4-hydroxybutyrate pathway and being capable of producing 4-hydroxybutyrate, wherein the microbial organism comprises a genetic modification that decreases expression of an alcohol dehydrogenase (see Example XXXVII). In such an embodiment, the microbial organism can exhibit decreased backflux from a downstream product of the 4-hydroxybutyrate pathway relative to a parent microbial organism in the absence of said genetic modification. At high titers of BDO, a downstream product from 4-hydroxybutyrate, the high concentrations of product can result in backflux within the pathway or through side reactions, thereby resulting in a decreased product yield and/or an increase in toxic byproduct formation such as aldehydes. As described herein, several endogenous alcohol dehydrogenases were found to contribute to backflux, whereas deletion of one or more of the endogenous alcohol dehydrogenases decreased backflux without reducing production of 4-hydroxybutyrate or BDO, and in fact increased BDO formation (see Example XXXVII).

[0168] In still another embodiment, the invention provides a non-naturally occurring microbial organism having a 4-hydroxybutyrate pathway and being capable of producing 4-hydroxybutyrate, wherein the microbial organism comprises a genetic modification that decreases expression of a non-energy-producing NADH dehydrogenase (see Example XVIII). The decreased expression of a non-energy-producing NADH dehydrogenase suppresses depletion of the NADH pool resulting from the activity of the non-energy-producing NADH dehydrogenase. Additionally, the microbial organisms exhibit increased energy efficiency in the microbial organism relative to a parent microbial organism in the absence of the genetic modification. As described herein, the electron transport chain has multiple NADH dehydrogenases and cytochrome oxidases with varying ability to translocate protons. Some NADH dehydrogenases consume NADH without linking the consumption to proton translocation and energy production, and such NADH dehydrogenases are considered to be non-energy-producing NADH dehydrogenases. One exemplary non-energy-producing NADH dehydrogenase is NADH II of E. coli (see Example XXXVIII). Additional genes encoding enzymes with non-energy producing NAD(P)H dehydrogenase activities include wrbA, yieF, and kefF. One skilled in the art will readily understand the meaning of a non-energy-producing NADH dehydrogenase as one that does not couple NADH oxidation to electron transport and proton translocation and the formation of ATP. By decreasing expression of a non-energy-producing NADH dehydrogenase, the depletion of the NADH pool within the cell is suppressed, thereby making the cell more energy efficient and/or allowing NADH to be utilized in desired synthetic pathways.

[0169] In a further embodiment, the invention provides a non-naturally occurring microbial organism having a 4-hydroxybutyrate pathway and being capable of producing 4-hydroxybutyrate, wherein the microbial organism comprises a genetic modification that decreases expression of a cytochrome oxidase (see Example XXXIX). In such an embodiment, the microbial organism can exhibit increased energy efficiency relative to a parent microbial organism in the absence of the genetic modification. As disclosed herein, cytochrome oxidases involved in the electron transport chain have different energy-conserving efficiencies. By decreasing expression of one or more cytochrome oxidases, the energy efficiency of the cell can be increased (see Example XXXIX). Even in a case where an increase in product yield is not observed under certain conditions (see Example XXXIX), such genetic modifications can be advantageous in providing a greater tolerance for a range of oxygen concentrations, in particular producing a product more efficiently in a large fermentor, where the available oxygen varies within the ferementor. By improving the energy efficiency of the microbial organism, the organism can tolerate lower oxygen conditions since need for energy production from the electron transport chain is reduced. Thus, in a particular embodiment of the invention, the microbial organism can exhibit an increased tolerance to a range of oxygen concentrations relative to a parent microbial organism in the absence of said genetic modification.

[0170] The invention thus provides a non-naturally occurring microbial organism having a 4-hydroxybutyrate pathway and being capable of producing 4-hydroxybutyrate, wherein the microbial organism comprises a genetic modification, the genetic modification selected from: (A) a genetic modification that increases expression of acetate kinase and phosphotransacetylase; (B) a genetic modification that inactivates expression of an aerobic respiratory control regulatory system; (C) a genetic modification that truncates a glucose phosphotransferase system (PTS) permease; (D) a genetic modification that increases expression of phosphoenolpyruvate carboxylase; (E) a genetic modification that increases expression of alpha-ketoglutarate dehydrogenase; (F) a genetic modification that increases expression of a non-phosphotransferase (PTS) glucose uptake system; (G) a genetic modification that increases expression of a gamma-butyrolactone esterase; (H) a genetic modification that decreases expression of succinyl-CoA synthetase; (I) a genetic modification that decreases expression of an acyl coenzyme A thioesterase; (J) a genetic modification that decreases expression of an alcohol dehydrogenase; (K) a genetic modification that decreases expression of a non-energy-producing NADH dehydrogenase; (L) a genetic modification that decreases expression of a cytochrome oxidase; and (M) a combination of two or more, for example, three or more, four or more, five or more, six or more, seven or more, eight or more, or nine or more, ten or more, eleveno or more, or all of the genetic modifications of parts (A)-(L).

[0171] In another embodiment, the invention provides a microbial organism comprising a genetic modification, where the genetic modification is selected from: (A) a genetic modification that increases expression of acetate kinase and phosphotransacetylase; (B) a genetic modification that inactivates expression of an aerobic respiratory control regulatory system; (C) a genetic modification that truncates a glucose phosphotransferase system (PTS) permease; and (N) a combination of two or more, or all of the genetic modifications of parts (A)-(C). In a further embodiment, such a microbial organism can further comprise a genetic modification is selected from: (D) a genetic modification that increases expression of phosphoenolpyruvate carboxylase; (E) a genetic modification that increases expression of alpha-ketoglutarate dehydrogenase; (F) a genetic modification that increases expression of a non-phosphotransferase (PTS) glucose uptake system; (G) a genetic modification that increases expression of a gamma-butyrolactone esterase; (H) a genetic modification that decreases expression of succinyl-CoA synthetase; (I) a genetic modification that decreases expression of an acyl coenzyme A thioesterase; (J) a genetic modification that decreases expression of an alcohol dehydrogenase; (K) a genetic modification that decreases expression of a non-energy-producing NADH dehydrogenase; (L) a genetic modification that decreases expression of a cytochrome oxidase; and (M) a combination of two or more, three or more, four or more, five or more, six or more, seven or more, eight or more, nine or more, ten or more, eleven or more, or all of the genetic modifications of parts (A)-(L).

[0172] In further particular embodiments, (a) the microbial organism of part (A) has increased conversion of acetate to acetyl-CoA and/or reduced secretion of acetate; (b) the microbial organism of part (B) has an inactivation mutation in arcA by an insertion in the coding sequence; (c) the microbial organism of part (C) has reduced glucose uptake and/or decreased production of acetate, pyruvate and/or glutamate; (d) the microbial organism of part (D), (E), or (F) has decreased production of ethanol, acetate, pyruvate or alanine, or a combination thereof, relative to a parent microbial organism in the absence of said genetic modification; (e) the microbial organism of part (E) has decreased production of glutamate relative to a parent microbial organism in the absence of said genetic modification; (f) the microbial organism of part (F) has a genetic modification comprising increased expression of a permease, glucokinase, or a glucose facilitator, or a combination thereof; (g) the microbial organism of part (G) has decreased production of gamma-butyrolactone relative to a parent microbial organism in the absence of said genetic modification; (h) the microbial organism of part (H) has increased production of 4-hydroxybutyrate relative to a parent microbial organism in the absence of said genetic modification; (i) the microbial organism of part (I) has decreased production of gamma-butyrolactone relative to a parent microbial organism in the absence of said genetic modification; (j) the microbial organism of part (I) has a genetic modification comprising at least two genetic modifications that decrease expression of at least two acyl coenzyme A thioesterases; (k) the microbial organism of part (J) has decreased backflux from a downstream product of the 4-hydroxybutyrate pathway relative to a parent microbial organism in the absence of said genetic modification; (l) the microbial organism of part (K) has suppressed depletion of the NADH pool or increased energy efficiency in the microbial organism, or a combination thereof, relative to a parent microbial organism in the absence of said genetic modification; (m) the microbial organism of part (L) has increased energy efficiency relative to a parent microbial organism in the absence of said genetic modification; or (n) the microbial organism of part (L) has increased tolerance to a range of oxygen concentrations relative to a parent microbial organism in the absence of said genetic modification.

[0173] In a further embodiment, the invention provides a microbial organism, where the microbial organism of parts (G) or (I) further comprises a 4-hydroxybutyryl-CoA pathway. Additional metabolic modifications include, but are not limited to, a genetic modification that increases expression of acetate kinase and/or phosphotransacetylase (see Example XXXX), a genetic modification that decreases expression of arcA, in particular an insertion mutation (see Example XXXXI), or a genetic modification in which a glucose permease is a modified variant such as a truncation (see Example XXXXII). The invention further provides a method for producing 4-hydroxybutyrate utilizing such microbial organisms. It is understood that such genetic modifications include, but are not limited to, the specifically described gene additions and disruptions described in Examples XXIV-XXXXII. It is understood that the genetic modifications described herein can be used alone or in combination with other genetic modifications, particularly those disclosed herein, as desired to provide desirable characteristics of a production strain. In the case of gene disruptions, it is understood that such disruptions involve disruption of an endogenous gene encoding an activity of a corresponding gene product to be decreased.

[0174] In still a further embodiment, a microbial organism of the invention can further comprise a metabolic modification selected from: (i) a genetic modification that increases expression of pyruvate dehydrogenase; (ii) a genetic modification that decreases expression of an aerobic respiratory control regulatory system; (iii) a genetic modification that increases expression of an NADH insensitive citrate synthase; (iv) a genetic modification that decreases expression of malate dehydrogenase; (v) a genetic modification that decreases expression of lactate dehydrogenase; (vi) a genetic modification that decreases expression of alcohol dehydrogenase; (vii) a genetic modification that decreases expression of pyruvate formate lyase; (viii) a genetic modification that increases expression of phosphoenolpyruvate carboxykinase; and (ix) a combination of two or more, three or more, four or more, five or more, six or more, seven or more, or all of the genetic modifications of parts (i)-(viii).

[0175] Although the pathways immediately above are directed to 4-HB pathways, it is understood, as disclosed herein, the 4-HB is a precursor to downstream products such as 1,4-butanediol (BDO). Further, as disclosed herein, a microbial organism having a 4-HB pathway can further include enzymes that convert 4-HB to a downstream product such as BDO, as desired. In addition, any of the pathways described herein that produce 4-HB are understood to provide a 4-HB pathway, even if additional steps in a pathway are also disclosed since such a pathway produces 4-HB. Thus, the invention provides microbial organisms comprising a 4-HB pathway or a BDO pathway, wherein the organism comprises one or more of the genetic modifications disclosed herein and produces 4-HB, 4-HB-CoA, or BDO, as well as methods of producing products such as 4-HB, 4-HB-CoA and/or BDO using such an organism. It is further understood that the genetic modifications can be used alone or in various combinations of one or more of the genetic modifications, as disclosed herein (see Examples). Additionally, it is understood that a genetic modification can result in a desired effect, including but not limited to increased product yield, decreased byproduct production, in particular toxic or growth suppressive byproducts, for example, aldehydes, improved strain culture growth or fermentation characteristics, improved ability to isolate or purify a desired product, and the like. Furthermore, it is understood that increased production of a downstream product, for example, BDO, can be indicative of increased production of an upstream product, for example, a pathway intermediate such as 4HB, where increased production of the downstream product indicates increased flux through an upstream product. One skilled in the art can readily understand these or other desirable characteristics of a microbial organism of the invention for producing a desired pathway product or intermediate. Thus, using methods disclosed herein and those well known in the art, one skilled in the art can incorporate various metabolic modifications, incorporate appropriate expression control elements and/or methods, and/or variant enzymes to provide a microbial organism having optimized production properties. It is further understood that such optimized production properties can be readily determined by those skilled in the art, including increasing or decreasing the expression level of a particular molecule, including metabolic modifications and/or enzymes or proteins of a 4-HB, 4-HBal, 4-HBCoA, BDO or putrescine pathway.

[0176] As used herein, the term “parent microbial organism,” when used in the context of a genetic modification, is understood to mean a parent organism or strain in which the particular genetic modification has not been made but otherwise has the same genetic makeup. For example, if a strain of microbial organism is used to make a genetic modification that increases expression of a gene product, the parent strain would be the starting strain into which the heterologous gene is introduced. Similarly, a parent microbial organism of an organism in which a genetic modification has been made to decrease expression, such as a gene disruption or gene deletion, the parent microbial organism would have the same genetic background except for the gene disruption or deletion. However, it is understood that a parent microbial organism can differ by more than one genetic modification, either gene addition and/or disruption, depending on whether a single or multiple genetic modifications are being considered. One skilled in the art will readily understand the meaning of such a parent microbial organism in that the microbial organism is considered to be an appropriate control, as understood in the art, for observing the effect of one or more genetic modifications.

[0177] In addition, it is understood by those skilled in the art that a genetic modification such as those disclosed herein can contribute to an increase in product yield, a decrease in by-product formation, and/or improved characteristics of the microbial organism. Such improved characteristics include, but are not limited to, improved cell growth, increased energy efficiency, increased tolerance of a range of oxygen concentrations, particularly when manifested in a scaled up production process such as in large fermentors. A useful genetic modification may not alone, when compared to a parent microbial organism, exhibit an effect that can readily measured under a given set of conditions. However, a useful genetic modification can be advantageous if the modification on its on under a given set of conditions and/or in combination with one or more other genetic modifications is beneficial to the growth and/or production characteristics of the microbial organism.

[0178] It is understood that a genetic modification that increases expression of a desired enzyme is generally carried out by introducing into the microbial organism a heterologous nucleic acid encoding the desired enzyme. However, it is understood, as described herein, that a metabolic modification to increase expression can include modification of a regulatory region of an endogenous gene, such as a promoter and/or enhancer. Additionally, a genetic modification that decreases expression of a desired enzyme will generally involve a gene disruption or deletion, although modification of a regulatory to decrease expression can also be utilized, as disclosed herein.

[0179] It is further understood that any of a number of genetic modifications, as disclosed herein, can be used alone or in various combinations of one or more of the genetic modifications disclosed herein to increase the production of BDO in a BDO producing microbial organism. In a particular embodiment, the microbial organism can be genetically modified to incorporate any and up to all of the genetic modifications that lead to increased production of BDO. In a particular embodiment, the microbial organism containing a BDO pathway can be genetically modified to express exogenous succinyl-CoA synthetase; to express exogenous alpha-ketoglutarate decarboxylase; to express exogenous succinate semialdehyde dehydrogenase and 4-hydroxybutyrate dehydrogenase and optionally 4-hydroxybutyryl-CoA/acetyl-CoA transferase; to express exogenous butyrate kinase and phosphotransbutyrylase; to express exogenous 4-hydroxybutyryl-CoA reductase; and to express exogenous 4-hydroxybutanal reductase; to express exogenous pyruvate dehydrogenase; to disrupt a gene encoding an aerobic respiratory control regulatory system; to express an exogenous NADH insensitive citrate synthase; and to express exogenous phosphoenolpyruvate carboxykinase. Such strains for improved production are described in Examples XII-XIX. It is thus understood that, in addition to the modifications described above, such strains can additionally include other modifications disclosed herein. Such modifications include, but are not limited to, deletion of endogenous lactate dehydrogenase (ldhA), alcohol dehydrogenase (adhE), and/or pyruvate formate lyase (pflB)(see Examples XII-XIX and Table 18). Additional genetic modifications that can be introduced into a microbial organism include those described in Examples XXIV-XXXX, alone or in combination, including in combination with other genetic modifications disclosed herein.

[0180] The invention additionally provides a microbial organism that, in addition to one or more of the metabolic modifications of (A)-(J) described above, optionally further comprises a metabolic modification selected from (i) a genetic modification that increases expression of pyruvate dehydrogenase; (ii) a genetic modification that decreases expression of an aerobic respiratory control regulatory system; (iii) a genetic modification that increases expression of an NADH insensitive citrate synthase; (iv) a genetic modification that decreases expression of malate dehydrogenase; (v) a genetic modification that decreases expression of lactate dehydrogenase; (vi) a genetic modification that decreases expression of alcohol dehydrogenase; (vii) a genetic modification that decreases expression of pyruvate formate lyase; and (viii) a combination of two or more, three or more, four or more, five or more, six or more, or all of the genetic modifications of parts (i)-(vii). It is understood that any of the various combinations of metabolic modifications disclosed herein can be combined with each other, or with individual metabolic modifications A-P, to generate further combinations.

[0181] Additionally provided is a microbial organism in which one or more genes encoding the exogenously expressed enzymes are integrated into the fimD locus of the host organism (see Example XVII). For example, one or more genes encoding a BDO, 4-HB, 4-HBal, 4-HBCoA and/or putrescine pathway enzyme can be integrated into the fimD locus for increased production of BDO, 4-HB, 4-HBal, 4-HBCoA and/or putrescine. Further provided is a microbial organism expressing a non-phosphotransferase sucrose uptake system that increases production of BDO.

[0182] Although the genetically modified microbial organisms disclosed herein are exemplified with microbial organisms containing particular BDO, 4-HB, 4-HBal, 4-HBCoA and/or putrescine pathway enzymes, it is understood that such modifications can be incorporated into any microbial organism having a BDO, 4-HB, 4-HBal, 4-HBCoA and/or putrescine pathway suitable for enhanced production in the presence of the genetic modifications of any of the pathways disclosed herein. The microbial organisms of the invention can thus have any of the BDO, 4-HB, 4-HBal, 4-HBCoA and/or putrescine pathways disclosed herein (see, for example, FIGS. 1, 8-13, 58, 62, 63, 69 and 70). For example, if a depicted pathway shows a BDO pathway, whereas 4-hydroxybutyrate is an intermediate of the BDO pathway, it is understood, as disclosed herein, that a pathway to 4-hydroxybutyrate is also provided, if desired. Thus, the pathways described herein can produce an end product of a depicted pathway or a desired intermediate of a depicted pathway, as described herein. It is further understood that a pathway enzyme can be a variant enzyme, including but not limited to the variant enzymes disclosed herein (see Example XXXXIII) so long as the pathway produces a desired pathway end product or pathway intermediate.

[0183] In an embodiment of the invention, a microbial organism is provided comprising a metabolic modification and a pathway to a desired product such as BDO, 4-HB, 4-HBal, 4-HBCoA and/or putrescine. Exemplary pathways are disclosed herein and include the pathways depicted in FIGS. 1, 8-13, 58, 62, 63, 69 and 70. In one embodiment, the microbial organism comprises a 4-hydroxybutanoic acid (4-HB) and/or 1,4-butanediol (1,4-BDO) biosynthetic pathway comprising an α-ketoglutarate decarboxylase, or an α-ketoglutarate dehydrogenase and a CoA-dependent succinic semialdehyde dehydrogenase, or a glutamate:succinate semialdehyde transaminase and a glutamate decarboxylase; a 4-hydroxybutanoate dehydrogenase; a 4-hydroxybutyryl-CoA:acetyl-CoA transferase, or a butyrate kinase and a phosphotransbutyrylase; an aldehyde dehydrogenase; and an alcohol dehydrogenase.

[0184] In another embodiment, the microbial organism can comprise a 4-HB and/or BDO pathway comprising alpha-ketoglutarate decarboxylase, or alpha-ketoglutarate dehydrogenase and CoA-dependent succinate semialdehyde dehydrogenase, or glutamate:succinate semialdehyde transaminase and glutamate decarboxylase; 4-hydroxybutyrate dehydrogenase; 4-hydroxybutyryl-CoA transferase, or 4-hydroxybutyrate kinase and phosphotrans-4-hydroxybutyrylase; 4-hydroxybutyryl-CoA reductase; and 4-hydroxybutyraldehyde reductase, or aldehyde/alcohol dehydrogenase. In still another embodiment, the microbial organisms can comprise a 4-HB and/or BDO pathway comprising alpha-ketoglutarate decarboxylase, or succinyl-CoA synthetase and CoA-dependent succinate semialdehyde dehydrogenase; 4-hydroxybutyrate dehydrogenase; 4-hydroxybutyryl-CoA transferase, or 4-hydroxybutyrate kinase and phosphotrans-4-hydroxybutyrylase; and aldehyde dehydrogenase; and alcohol dehydrogenase, or aldehyde/alcohol dehydrogenase. In another embodiment, the microbial organism can comprise a 4-HB and/or BDO pathway comprising alpha-ketoglutarate decarboxylase, or glutamate dehydrogenase and glutamate decarboxylase, and deaminating 4-aminobutyrate oxidoreductase or 4-aminobutyrate transaminase, or alpha-ketoglutarate dehydrogenase and CoA-dependent succinate semialdehyde dehydrogenase; 4-hydroxybutyrate dehydrogenase; and 4-hydroxybutyrate kinase and phosphotrans-4-hydroxybutyrylase and 4-hydroxybutyryl-CoA reductase and 4-hydroxybutyraldehyde reductase, or 4-hydroxybutyrate kinase and phosphorylating 4-hydroxybutanal dehydrogenase and 4-hydroxybutyraldehyde reductase, or 4-hydroxybutyrate kinase and phosphotrans-4-hydroxybutyrylase and alcohol forming 4-hydroxybutyryl-CoA reductase, or 4-hydroxybutyryl-CoA transferase or 4-hydroxybutyryl-CoA hydrolase or 4-hydroxybutyryl-CoA ligase and 4-hydroxybutyryl-CoA reductase and 4-hydroxybutyraldehyde reductase, or 4-hydroxybutyryl-CoA transferase or 4-hydroxybutyryl-CoA hydrolase or 4-hydroxybutyryl-CoA ligase and alcohol forming 4-hydroxybutyryl-CoA reductase. In yet another embodiment, the microbial organism can comprise a BDO pathway comprising glutamate CoA transferase or glutamyl-CoA hydrolase or glutamyl-CoA ligase and glutamyl-CoA reductase and glutamate-5-semialdehyde reductase, or glutamate CoA transferase or glutamyl-CoA hydrolase or glutamyl-CoA ligase and alcohol forming glutamyl-CoA reductase, or glutamate 5-kinase and phosphorylating glutamate-5-semialdehyde dehydrogenase and glutamate-5-semialdehyde reductase; deaminating 2-amino-5-hydroxypentanoic acid oxidoreductase or 2-amino-5-hydroxypentanoic acid transaminase; and 5-hydroxy-2-oxopentanoic acid decarboxylase and 4-hydroxybutyraldehyde reductase, or decarboxylating 5-hydroxy-2-oxopentanoic acid dehydrogenase and 4-hydroxybutyryl-CoA reductase and 4-hydroxybutyraldehyde reductase; or decarboxylating 5-hydroxy-2-oxopentanoic acid dehydrogenase and alcohol forming 4-hydroxybutyryl-CoA reductase.

[0185] In a further embodiment of the invention, the microbial organism can comprise a 4-HB and/or BDO pathway comprising 3-hydroxybutyryl-CoA dehydrogenase; 3-hydroxybutyryl-CoA dehydratase; vinylacetyl-CoA A-isomerase; 4-hydroxybutyryl-CoA dehydratase; and 4-hydroxybutyryl-CoA reductase (alcohol forming); or 4-hydroxybutyryl-CoA reductase and 1,4-butanediol dehydrogenase.

[0186] In still a further embodiment of the invention, the microbial organism can comprise a 4-HB and/or BDO pathway comprising glutamate CoA transferase; glutamyl-CoA hydrolase; glutamyl-CoA ligase; glutamate 5-kinase; glutamate-5-semialdehyde dehydrogenase (phosphorylating); glutamyl-CoA reductase; glutamate-5-semialdehyde reductase; glutamyl-CoA reductase (alcohol forming); 2-amino-5-hydroxypentanoic acid oxidoreductase (deaminating); 2-amino-5-hydroxypentanoic acid transaminase; 5-hydroxy-2-oxopentanoic acid decarboxylase; and 5-hydroxy-2-oxopentanoic acid dehydrogenase (decarboxylation); and optionally 4-hydroxybutyryl-CoA reductase (alcohol forming), 4-hydroxybutyryl-CoA reductase, or 1,4-butanediol dehydrogenase. In another embodiment, the microbial organism can comprise a 4-HB and/or BDO pathway comprising glutamate CoA transferase; glutamyl-CoA hydrolase; glutamyl-CoA ligase; glutamate 5-kinase; glutamate-5-semialdehyde dehydrogenase (phosphorylating); glutamyl-CoA reductase; glutamate-5-semialdehyde reductase; glutamyl-CoA reductase (alcohol forming); 2-amino-5-hydroxypentanoic acid oxidoreductase (deaminating); 2-amino-5-hydroxypentanoic acid transaminase; 5-hydroxy-2-oxopentanoic acid decarboxylase; and 5-hydroxy-2-oxopentanoic acid dehydrogenase (decarboxylation); and optionally 4-hydroxybutyryl-CoA reductase (alcohol forming), 4-hydroxybutyryl-CoA reductase, or 1,4-butanediol dehydrogenase.

[0187] In another embodiment of the invention, the microbial organism can comprise a 4-HB and/or BDO pathway comprising glutamate dehydrogenase; glutamate decarboxylase; 4-aminobutyrate oxidoreductase (deaminating); and 4-hydroxybutyrate dehydrogenase; and further comprising (a) 4-hydroxybutyrate kinase; phosphotrans-4-hydroxybutyrylase; 4-hydroxybutyryl-CoA reductase; and 1,4-butanediol dehydrogenase; (b) 4-hydroxybutyryl-CoA transferase, 4-hydroxybutyryl-CoA hydrolase, or 4-hydroxybutyryl-CoA ligase; 4-hydroxybutyryl-CoA reductase; and 1,4-butanediol dehydrogenase; (c) 4-hydroxybutyryl-CoA transferase, 4-hydroxybutyryl-CoA hydrolase, or 4-hydroxybutyryl-CoA ligase; and 4-hydroxybutyryl-CoA reductase (alcohol forming); (d) 4-hydroxybutyrate kinase; 4-hydroxybutanal dehydrogenase (phosphorylating); and 1,4-butanediol; or (e) 4-hydroxybutyrate kinase; phosphotrans-4-hydroxybutyrylase; and 4-hydroxybutyryl-CoA reductase (alcohol forming). In still another embodiment, the microbial organism can comprise a 4-HB and/or BDO pathway comprising alpha-ketoglutarate decarboxylase, or glutamate dehydrogenase and glutamate decarboxylase and 4-aminobutyrate transaminase; and 4-hydroxybutyrate dehydrogenase; and further comprising (a) 4-hydroxybutyryl-CoA ligase; 4-hydroxybutyryl-CoA reductase; and 1,4-butanediol dehydrogenase; (b) 4-hydroxybutyryl-CoA transferase, 4-hydroxybutyryl-CoA hydrolase, or 4-hydroxybutyryl-CoA ligase; and 4-hydroxybutyryl-CoA reductase (alcohol forming); (c) 4-hydroxybutyrate kinase; 4-hydroxybutanal dehydrogenase (phosphorylating); and 1,4-butanediol dehydrogenase; or (d) 4-hydroxybutyrate kinase; phosphotrans-4-hydroxybutyrylase; and 4-hydroxybutyryl-CoA reductase (alcohol forming). In yet another embodiment, the microbial organism can comprise a 4-HB and/or BDO pathway comprising alpha-ketoglutarate dehydrogenase; CoA-dependent succinic semialdehyde dehydrogenase; and 4-hydroxybutyrate dehydrogenase; and further comprising (a) 4-hydroxybutyryl-CoA ligase; 4-hydroxybutyryl-CoA reductase; and 1,4-butanediol dehydrogenase; (b) 4-hydroxybutyryl-CoA transferase, 4-hydroxybutyryl-CoA hydrolase, or 4-hydroxybutyryl-CoA ligase; and 4-hydroxybutyryl-CoA reductase (alcohol forming); (c) 4-hydroxybutyrate kinase; 4-hydroxybutanal dehydrogenase (phosphorylating); and 1,4-butanediol dehydrogenase; or (d) 4-hydroxybutyrate kinase; phosphotrans-4-hydroxybutyrylase; and 4-hydroxybutyryl-CoA reductase (alcohol forming).

[0188] In a further embodiment, the microbial organism can comprise a 4-HB and/or 4-hydroxybutanal and/or BDO pathway comprising succinyl-CoA reductase (aldehyde forming); 4-hydroxybutyrate dehydrogenase; and 4-hydroxybutyrate reductase, also referred to herein as carboxylic acid reductase. In another embodiment, the microbial organism can comprise a 4-HB and/or 4-hydroxybutanal and/or BDO pathway comprising alpha-ketoglutarate decarboxylase; 4-hydroxybutyrate dehydrogenase; and 4-hydroxybutyrate reductase, also referred to herein as carboxylic acid reductase.

[0189] For example, the BDO pathway can comprise 4-hydroxybutanoate dehydrogenase, succinyl-CoA synthetase, CoA-dependent succinic semialdehyde dehydrogenase, 4-hydroxybutyrate:CoA transferase, 4-butyrate kinase, phosphotransbutyrylase, alpha-ketoglutarate decarboxylase, aldehyde dehydrogenase, alcohol dehydrogenase or an aldehyde/alcohol dehydrogenase (see FIG. 1). Alternatively, the BDO pathway can comprise 4-aminobutyrate CoA transferase, 4-aminobutyryl-CoA hydrolase, 4-aminobutyrate-CoA ligase, 4-aminobutyryl-CoA oxidoreductase (deaminating), 4-aminobutyryl-CoA transaminase, or 4-hydroxybutyryl-CoA dehydrogenase (see Table 17 in WO2013/184602). Such a BDO pathway can further comprise 4-hydroxybutyryl-CoA reductase (alcohol forming), 4-hydroxybutyryl-CoA reductase, or 1,4-butanediol dehydrogenase.

[0190] Additionally, the BDO pathway can comprise 4-aminobutyrate CoA transferase, 4-aminobutyryl-CoA hydrolase, 4-aminobutyrate-CoA ligase, 4-aminobutyryl-CoA reductase (alcohol forming), 4-aminobutyryl-CoA reductase, 4-aminobutan-1-ol dehydrogenase, 4-aminobutan-1-ol oxidoreductase (deaminating) or 4-aminobutan-1-ol transaminase (see Table 18 in WO2013/184602). Also, the BDO pathway can comprise 4-aminobutyrate kinase, 4-aminobutyraldehyde dehydrogenase (phosphorylating), 4-aminobutan-1-ol dehydrogenase, 4-aminobutan-1-ol oxidoreductase (deaminating), 4-aminobutan-1-ol transaminase, [(4-aminobutanolyl)oxy]phosphonic acid oxidoreductase (deaminating), [(4-aminobutanolyl)oxy]phosphonic acid transaminase, 4-hydroxybutyryl-phosphate dehydrogenase, or 4-hydroxybutyraldehyde dehydrogenase (phosphorylating) (see Table 19 in WO2013/184602). Such a pathway can further comprise 1,4-butanediol dehydrogenase.

[0191] The BDO pathway can also comprise alpha-ketoglutarate 5-kinase, 2,5-dioxopentanoic semialdehyde dehydrogenase (phosphorylating), 2,5-dioxopentanoic acid reductase, alpha-ketoglutarate CoA transferase, alpha-ketoglutaryl-CoA hydrolase, alpha-ketoglutaryl-CoA ligase, alpha-ketoglutaryl-CoA reductase, 5-hydroxy-2-oxopentanoic acid dehydrogenase, alpha-ketoglutaryl-CoA reductase (alcohol forming), 5-hydroxy-2-oxopentanoic acid decarboxylase, or 5-hydroxy-2-oxopentanoic acid dehydrogenase (decarboxylation)(see Table 20 in WO2013/184602). Such a BDO pathway can further comprise 4-hydroxybutyryl-CoA reductase (alcohol forming), 4-hydroxybutyryl-CoA reductase, or 1,4-butanediol dehydrogenase. Additionally, the BDO pathway can comprise glutamate CoA transferase, glutamyl-CoA hydrolase, glutamyl-CoA ligase, glutamate 5-kinase, glutamate-5-semialdehyde dehydrogenase (phosphorylating), glutamyl-CoA reductase, glutamate-5-semialdehyde reductase, glutamyl-CoA reductase (alcohol forming), 2-amino-5-hydroxypentanoic acid oxidoreductase (deaminating), 2-amino-5-hydroxypentanoic acid transaminase, 5-hydroxy-2-oxopentanoic acid decarboxylase, 5-hydroxy-2-oxopentanoic acid dehydrogenase (decarboxylation)(see Table 21 in WO2013/184602). Such a BDO pathway can further comprise 4-hydroxybutyryl-CoA reductase (alcohol forming), 4-hydroxybutyryl-CoA reductase, or 1,4-butanediol dehydrogenase.

[0192] Additionally, the BDO pathway can comprise 3-hydroxybutyryl-CoA dehydrogenase, 3-hydroxybutyryl-CoA dehydratase, vinylacetyl-CoAΔ-isomerase, or 4-hydroxybutyryl-CoA dehydratase (see Table 22 in WO2013/184602). Also, the BDO pathway can comprise homoserine deaminase, homoserine CoA transferase, homoserine-CoA hydrolase, homoserine-CoA ligase, homoserine-CoA deaminase, 4-hydroxybut-2-enoyl-CoA transferase, 4-hydroxybut-2-enoyl-CoA hydrolase, 4-hydroxybut-2-enoyl-CoA ligase, 4-hydroxybut-2-enoate reductase, 4-hydroxybutyryl-CoA transferase, 4-hydroxybutyryl-CoA hydrolase, 4-hydroxybutyryl-CoA ligase, or 4-hydroxybut-2-enoyl-CoA reductase (see Table 23 in WO2013/184602). Such a BDO pathway can further comprise 4-hydroxybutyryl-CoA reductase (alcohol forming), 4-hydroxybutyryl-CoA reductase, or 1,4-butanediol dehydrogenase.

[0193] The BDO pathway can additionally comprise succinyl-CoA reductase (alcohol forming), 4-hydroxybutyryl-CoA hydrolase, 4-hydroxybutyryl-CoA ligase, or 4-hydroxybutanal dehydrogenase (phosphorylating) (see Table 15 in WO2013/184602). Such a pathway can further comprise succinyl-CoA reductase, 4-hydroxybutyrate dehydrogenase, 4-hydroxybutyryl-CoA transferase, 4-hydroxybutyrate kinase, phosphotrans-4-hydroxybutyrylase, 4-hydroxybutyryl-CoA reductase, 4-hydroxybutyryl-CoA reductase (alcohol forming), or 1,4-butanediol dehydrogenase. Also, the BDO pathway can comprise glutamate dehydrogenase, 4-aminobutyrate oxidoreductase (deaminating), 4-aminobutyrate transaminase, glutamate decarboxylase, 4-hydroxybutyryl-CoA hydrolase, 4-hydroxybutyryl-CoA ligase, or 4-hydroxybutanal dehydrogenase (phosphorylating)(see Table 16 in WO2013/184602). Such a BDO pathway can further comprise alpha-ketoglutarate decarboxylase, 4-hydroxybutyrate dehydrogenase, 4-hydroxybutyryl-CoA transferase, 4-hydroxybutyrate kinase, phosphotrans-4-hydroxybutyrylase, 4-hydroxybutyryl-CoA reductase, 4-hydroxybutyryl-CoA reductase (alcohol forming), or 1,4-butanediol dehydrogenase.

[0194] The invention additionally provides a non-naturally occurring microbial organism, comprising a 4-hydroxybutanal pathway comprising at least one exogenous nucleic acid encoding a 4-hydroxybutanal pathway enzyme expressed in a sufficient amount to produce 4-hydroxybutanal, the 4-hydroxybutanal pathway comprising succinyl-CoA reductase (aldehyde forming); 4-hydroxybutyrate dehydrogenase; and 4-hydroxybutyrate reductase (see FIG. 58, steps A-C-D). The invention also provides a non-naturally occurring microbial organism, comprising a 4-hydroxybutanal pathway comprising at least one exogenous nucleic acid encoding a 4-hydroxybutanal pathway enzyme expressed in a sufficient amount to produce 4-hydroxybutanal, the 4-hydroxybutanal pathway comprising alpha-ketoglutarate decarboxylase; 4-hydroxybutyrate dehydrogenase; and 4-hydroxybutyrate reductase (FIG. 58, steps B-C-D).

[0195] The invention further provides a non-naturally occurring microbial organism, comprising a 4-hydroxybutanal pathway comprising at least one exogenous nucleic acid encoding a 4-hydroxybutanal pathway enzyme expressed in a sufficient amount to produce 4-hydroxybutanal, the 4-hydroxybutanal pathway comprising succinate reductase; 4-hydroxybutyrate dehydrogenase, and 4-hydroxybutyrate reductase (see FIG. 62, steps F-C-D). In yet another embodiment, the invention provides a non-naturally occurring microbial organism, comprising a 4-hydroxybutanal pathway comprising at least one exogenous nucleic acid encoding a 4-hydroxybutanal pathway enzyme expressed in a sufficient amount to produce 4-hydroxybutanal, the 4-hydroxybutanal pathway comprising alpha-ketoglutarate decarboxylase, or glutamate dehydrogenase or glutamate transaminase and glutamate decarboxylase and 4-aminobutyrate dehydrogenase or 4-aminobutyrate transaminase; 4-hydroxybutyrate dehydrogenase; and 4-hydroxybutyrate reductase (see FIG. 62, steps B or ((J or K)-L-(M or N))-C-D).

[0196] The invention also provides a non-naturally occurring microbial organism, comprising a 4-hydroxybutanal pathway comprising at least one exogenous nucleic acid encoding a 4-hydroxybutanal pathway enzyme expressed in a sufficient amount to produce 4-hydroxybutanal, the 4-hydroxybutanal pathway comprising alpha-ketoglutarate reductase; 5-hydroxy-2-oxopentanoate dehydrogenase; and 5-hydroxy-2-oxopentanoate decarboxylase (see FIG. 62, steps X-Y-Z). In yet another embodiment, the invention provides a non-naturally occurring microbial organism, comprising a 4-hydroxybutyryl-CoA pathway comprising at least one exogenous nucleic acid encoding a 4-hydroxybutyryl-CoA pathway enzyme expressed in a sufficient amount to produce 4-hydroxybutyryl-CoA, the 4-hydroxybutyryl-CoA pathway comprising alpha-ketoglutarate reductase; 5-hydroxy-2-oxopentanoate dehydrogenase; and 5-hydroxy-2-oxopentanoate dehydrogenase (decarboxylation) (see FIG. 62, steps X-Y-AA).

[0197] The invention additionally provides a non-naturally occurring microbial organism, comprising a putrescine pathway comprising at least one exogenous nucleic acid encoding a putrescine pathway enzyme expressed in a sufficient amount to produce putrescine, the putrescine pathway comprising succinate reductase; 4-aminobutyrate dehydrogenase or 4-aminobutyrate transaminase; 4-aminobutyrate reductase; and putrescine dehydrogenase or putrescine transaminase (see FIG. 63, steps F-M/N-C-D/E). In still another embodiment, the invention provides a non-naturally occurring microbial organism, comprising a putrescine pathway comprising at least one exogenous nucleic acid encoding a putrescine pathway enzyme expressed in a sufficient amount to produce putrescine, the putrescine pathway comprising alpha-ketoglutarate decarboxylase; 4-aminobutyrate dehydrogenase or 4-aminobutyrate transaminase; 4-aminobutyrate reductase; and putrescine dehydrogenase or putrescine transaminase (see FIG. 63, steps B-M/N-C-D/E). The invention additionally provides a non-naturally occurring microbial organism, comprising a putrescine pathway comprising at least one exogenous nucleic acid encoding a putrescine pathway enzyme expressed in a sufficient amount to produce putrescine, the putrescine pathway comprising glutamate dehydrogenase or glutamate transaminase; glutamate decarboxylase; 4-aminobutyrate reductase; and putrescine dehydrogenase or putrescine transaminase (see FIG. 63, steps J/K-L-C-D/E).

[0198] The invention provides in another embodiment a non-naturally occurring microbial organism, comprising a putrescine pathway comprising at least one exogenous nucleic acid encoding a putrescine pathway enzyme expressed in a sufficient amount to produce putrescine, the putrescine pathway comprising alpha-ketoglutarate reductase; 5-amino-2-oxopentanoate dehydrogenase or 5-amino-2-oxopentanoate transaminase; 5-amino-2-oxopentanoate decarboxylase; and putrescine dehydrogenase or putrescine transaminase (see FIG. 63, steps O-P/Q-R-D/E). Also provided is a non-naturally occurring microbial organism, comprising a putrescine pathway comprising at least one exogenous nucleic acid encoding a putrescine pathway enzyme expressed in a sufficient amount to produce putrescine, the putrescine pathway comprising alpha-ketoglutarate reductase; 5-amino-2-oxopentanoate dehydrogenase or 5-amino-2-oxopentanoate transaminase; omithine dehydrogenase or omithine transaminase; and omithine decarboxylase (see FIG. 63, steps O-P/Q-S/T-U).

[0199] In an additional embodiment, the invention provides a non-naturally occurring microbial organism having a 4-HB, 4-HBal, 4-HBCoA, BDO or putrescine pathway, wherein the non-naturally occurring microbial organism comprises at least one exogenous nucleic acid encoding an enzyme or protein that converts a substrate of any of the pathways disclosed herein (see, for example, the Examples and FIGS. 1, 8-13, 58, 62, 63, 69 and 70). In an exemplary embodiment for producing BDO, the microbial organism can convert a substrate to a product selected from the group consisting of succinate to succinyl-CoA; succinyl-CoA to succinic semialdehyde; succinic semialdehyde to 4-hydroxybutrate; 4-hydroxybutyrate to 4-hydroxybutyryl-phosphate; 4-hydroxybutyryl-phosphate to 4-hydroxtbutyryl-CoA; 4-hydroxybutyryl-CoA to 4-hydroxybutanal; and 4-hydroxybutanal to 1,4-butanediol. In a pathway for producing 4-HBal, a microbial organism can convert, for example, succinate to succinic semialdehyde; succinic semialdehyde to 4-hydroxybutyrate; and 4-hydroxybutyrate to 4-hydroxybutanal. Such an organism can additionally include activity to convert 4-hydroxybutanal to 1,4-butanediol in order to produce BDO. Yet another pathway for producing 4-HBal can be, for example, alpha-ketoglutarate to succinic semialdehyde; succinic semialdehyde to 4-hydroxybutyrate; and 4-hydroxybutyrate to 4-hydroxybutanal. An alternative pathway for producing 4-HBal can be, for example, alpha-ketoglutarate to 2,5-dioxopentanoic acid; 2,5-dioxopentanoic acid to 5-hydroxy-2-oxopentanooic acid; and 5-hydroxy-2-oxopentanoic acid to 4-hydroxybutanal. An exemplary 4-hydroxybutyryl-CoA pathway can be, for example, alpha-ketoglutarate to 2,5-dioxopentanoic acid; 2,5-dioxopentanoic acid to 5-hydroxy-2-oxopentanoic acid; and 5-hydroxy-2-oxopentanoic acid to 4-hydroxybutyryl-CoA. An exemplary putrescine pathway can be, for example, succinate to succinyl-CoA; succinyl-CoA to succinic semialdehyde; succinic semialdehyde to 4-aminobutyrate; 4-aminobutyrate to 4-aminobutanal; and 4-aminobutanal to putrescine. An alternative putrescine pathway can be, for example, succinate to succinic semialdehyde; succinic semialdehyde to 4-aminobutyrate; 4-aminobutyrate to 4-aminobutanal; and 4-aminobutanal to putrescine. One skilled in the art will understand that these are merely exemplary and that any of the substrate-product pairs disclosed herein suitable to produce a desired product and for which an appropriate activity is available for the conversion can be readily determined by one skilled in the art based on the teachings herein. Thus, the invention provides a non-naturally occurring microbial organism containing at least one exogenous nucleic acid encoding an enzyme or protein, where the enzyme or protein converts the substrates and products of a pathway (see FIGS. 1, 8-13, 58, 62, 63, 69 and 70).

[0200] While generally described herein as a microbial organism that contains a 4-HB, 4-HBal, 4-HBCoA, BDO or putrescine pathway, it is understood that the invention additionally provides a non-naturally occurring microbial organism comprising at least one exogenous nucleic acid encoding a 4-HB, 4-HBal, 4-HBCoA, BDO or putrescine pathway enzyme or protein expressed in a sufficient amount to produce an intermediate of a 4-HB, 4-HBal, 4-HBCoA, BDO or putrescine pathway. For example, as disclosed herein, 4-HB, 4-HBal, 4-HBCoA, BDO and putrescine pathways are exemplified in FIGS. 1, 8-13, 58, 62, 63, 69 and 70. Therefore, in addition to a microbial organism containing, for example, a BDO pathway that produces BDO, the invention additionally provides a non-naturally occurring microbial organism comprising at least one exogenous nucleic acid encoding a BDO pathway enzyme, where the microbial organism produces a BDO pathway intermediate as a product rather than an intermediate of the pathway. In one exemplary embodiment as shown in FIG. 62, for example, the invention provides a microbial organism that produces succinyl-CoA, succinic semialdehyde, 4-hydroxybutyrate, 4-hydroxybutyryl-phosphate, 4-hydroxybutyryl-CoA, or 4-hydroxybutanal as a product rather than an intermediate. Another exemplary embodiment includes, for example, a microbial organism that produces alpha-ketoglutarate, 2,5-dioxopentanoic acid, 5-hydroxy-2-oxopentanoic acid, or 4-hydroxybutanal as a product rather than an intermediate. An exemplary embodiment in a putrescine pathway includes, for example, a microbial organism that produces glutamate, 4-aminobutyrate, or 4-aminobutanal as a product rather than an intermediate. An alternative embodiment in a putrescine pathway can be, for example, a microbial organism that produces 2,5-dioxopentanoate, 5-amino-2-oxopentanoate, or ornithine as a product rather than an intermediate.

[0201] It is understood that any of the pathways disclosed herein, as described in the Examples and exemplified in the Figures, including the pathways of FIGS. 1, 8-13, 58, 62, 63, 69 and 70, can be utilized to generate a non-naturally occurring microbial organism that produces any pathway intermediate or product, as desired. As disclosed herein, such a microbial organism that produces an intermediate can be used in combination with another microbial organism expressing downstream pathway enzymes to produce a desired product. However, it is understood that a non-naturally occurring microbial organism that produces a 4-HB, 4-HBal, 4-HBCoA, BDO or putrescine pathway intermediate can be utilized to produce the intermediate as a desired product.

[0202] The invention is described herein with general reference to the metabolic reaction, reactant or product thereof, or with specific reference to one or more nucleic acids or genes encoding an enzyme associated with or catalyzing the referenced metabolic reaction, reactant or product. Unless otherwise expressly stated herein, those skilled in the art will understand that reference to a reaction also constitutes reference to the reactants and products of the reaction. Similarly, unless otherwise expressly stated herein, reference to a reactant or product also references the reaction and that reference to any of these metabolic constituents also references the gene or genes encoding the enzymes that catalyze the referenced reaction, reactant or product. Likewise, given the well known fields of metabolic biochemistry, enzymology and genomics, reference herein to a gene or encoding nucleic acid also constitutes a reference to the corresponding encoded enzyme and the reaction it catalyzes as well as the reactants and products of the reaction.

[0203] As disclosed herein, the product 4-hydroxybutyrate, as well as other intermediates, are carboxylic acids, which can occur in various ionized forms, including fully protonated, partially protonated, and fully deprotonated forms. Accordingly, the suffix “-ate,” or the acid form, can be used interchangeably to describe both the free acid form as well as any deprotonated form, in particular since the ionized form is known to depend on the pH in which the compound is found. It is understood that carboxylate products or intermediates includes ester forms of carboxylate products or pathway intermediates, such as O-carboxylate and S-carboxylate esters. O- and S-carboxylates can include lower alkyl, that is C1 to C6, branched or straight chain carboxylates. Some such O- or S-carboxylates include, without limitation, methyl, ethyl, n-propyl, n-butyl, i-propyl, sec-butyl, and tert-butyl, pentyl, hexyl O- or S-carboxylates, any of which can further possess an unsaturation, providing for example, propenyl, butenyl, pentyl, and hexenyl O- or S-carboxylates. O-carboxylates can be the product of a biosynthetic pathway. Exemplary O-carboxylates accessed via biosynthetic pathways can include, without limitation, methyl 4-hydroxybutyrate, ethyl 4-hydroxybutyrate, and n-propyl 4-hydroxybutyrate. Other biosynthetically accessible O-carboxylates can include medium to long chain groups, that is C7-C22, O-carboxylate esters derived from fatty alcohols, such heptyl, octyl, nonyl, decyl, undecyl, lauryl, tridecyl, myristyl, pentadecyl, cetyl, palmitolyl, heptadecyl, stearyl, nonadecyl, arachidyl, heneicosyl, and behenyl alcohols, any one of which can be optionally branched and/or contain unsaturations. O-carboxylate esters can also be accessed via a biochemical or chemical process, such as esterification of a free carboxylic acid product or transesterification of an O- or S-carboxylate. S-carboxylates are exemplified by CoA S-esters, cysteinyl S-esters, alkylthioesters, and various aryl and heteroaryl thioesters.

[0204] The production of 4-HB via biosynthetic modes using the microbial organisms of the invention is particularly useful because it can produce monomeric 4-HB. The non-naturally occurring microbial organisms of the invention and their biosynthesis of 4-HB and BDO family compounds also is particularly useful because the 4-HB product can be (1) secreted; (2) can be devoid of any derivatizations such as Coenzyme A; (3) avoids thermodynamic changes during biosynthesis; (4) allows direct biosynthesis of BDO, and (5) allows for the spontaneous chemical conversion of 4-HB to γ-butyrolactone (GBL) in acidic pH medium. This latter characteristic also is particularly useful for efficient chemical synthesis or biosynthesis of BDO family compounds such as 1,4-butanediol and/or tetrahydrofuran (THF), for example.

[0205] Microbial organisms generally lack the capacity to synthesize 4-HB and therefore any of the compounds disclosed herein to be within the 1,4-butanediol family of compounds or known by those in the art to be within the 1,4-butanediol family of compounds. Moreover, organisms having all of the requisite metabolic enzymatic capabilities are not known to produce 4-HB from the enzymes described and biochemical pathways exemplified herein. Rather, with the possible exception of a few anaerobic microorganisms described further below, the microorganisms having the enzymatic capability to use 4-HB as a substrate to produce, for example, succinate. In contrast, the non-naturally occurring microbial organisms of the invention can generate 4-HB, 4-HBal, 4-HBCoA, BDO and/or putrescine as a product. As described above, the biosynthesis of 4-HB in its monomeric form is not only particularly useful in chemical synthesis of BDO family of compounds, it also allows for the further biosynthesis of BDO family compounds and avoids altogether chemical synthesis procedures.

[0206] The non-naturally occurring microbial organisms of the invention that can produce 4-HB, 4-HBal, 4-HBCoA, BDO and/or putrescine are produced by ensuring that a host microbial organism includes functional capabilities for the complete biochemical synthesis of at least one 4-HB, 4-HBal, 4-HBCoA, BDO and/or putrscine biosynthetic pathway of the invention Ensuring at least one requisite 4-HB, 4-HBal, 4-HBCoA or BDO biosynthetic pathway confers 4-HB biosynthesis capability onto the host microbial organism.

[0207] Several 4-HB biosynthetic pathways are exemplified herein and shown for purposes of illustration in FIG. 1. Additional 4-HB and BDO pathways are described in FIGS. 8-13. One 4-HB biosynthetic pathway includes the biosynthesis of 4-HB from succinate (the succinate pathway). The enzymes participating in this 4-HB pathway include CoA-independent succinic semialdehyde dehydrogenase and 4-hydroxybutanoate dehydrogenase. In this pathway, CoA-independent succinic semialdehyde dehydrogenase catalyzes the reverse reaction to the arrow shown in FIG. 1. Another 4-HB biosynthetic pathway includes the biosynthesis from succinate through succinyl-CoA (the succinyl-CoA pathway). The enzymes participating in this 4-HB pathway include succinyl-CoA synthetase, CoA-dependent succinic semialdehyde dehydrogenase and 4-hydroxybutanoate dehydrogenase. Three other 4-HB biosynthetic pathways include the biosynthesis of 4-HB from α-ketoglutarate (the α-ketoglutarate pathways). Hence, a third 4-HB biosynthetic pathway is the biosynthesis of succinic semialdehyde through glutamate:succinic semialdehyde transaminase, glutamate decarboxylase and 4-hydroxybutanoate dehydrogenase. A fourth 4-HB biosynthetic pathway also includes the biosynthesis of 4-HB from α-ketoglutarate, but utilizes α-ketoglutarate decarboxylase to catalyze succinic semialdehyde synthesis. 4-hydroxybutanoate dehydrogenase catalyzes the conversion of succinic semialdehyde to 4-HB. A fifth 4-HB biosynthetic pathway includes the biosynthesis from α-ketoglutarate through succinyl-CoA and utilizes α-ketoglutarate dehydrogenase to produce succinyl-CoA, which funnels into the succinyl-CoA pathway described above. Each of these 4-HB biosynthetic pathways, their substrates, reactants and products are described further below in the Examples. As described herein, 4-HB can further be biosynthetically converted to BDO by inclusion of appropriate enzymes to produce BDO (see Example). Thus, it is understood that a 4-HB pathway can be used with enzymes for converting 4-HB to BDO to generate a BDO pathway.

[0208] The non-naturally occurring microbial organisms of the invention can be produced by introducing expressible nucleic acids encoding one or more of the enzymes participating in one or more 4-HB, 4-HBal, 4-HBCoA, BDO or putrescine biosynthetic pathways. Depending on the host microbial organism chosen for biosynthesis, nucleic acids for some or all of a particular 4-HB, 4-HBal, 4-HBCoA, BDO or putrescine biosynthetic pathway can be expressed. For example, if a chosen host is deficient in one or more enzymes in a desired biosynthetic pathway, for example, the succinate to 4-HB pathway, then expressible nucleic acids for the deficient enzyme(s), for example, both CoA-independent succinic semialdehyde dehydrogenase and 4-hydroxybutanoate dehydrogenase in this example, are introduced into the host for subsequent exogenous expression. Alternatively, if the chosen host exhibits endogenous expression of some pathway enzymes, but is deficient in others, then an encoding nucleic acid is needed for the deficient enzyme(s) to achieve 4-HB, 4-HBal, 4-HBCoA, BDO or putrescine biosynthesis. For example, if the chosen host exhibits endogenous CoA-independent succinic semialdehyde dehydrogenase, but is deficient in 4-hydroxybutanoate dehydrogenase, then an encoding nucleic acid is needed for this enzyme to achieve 4-HB biosynthesis. Thus, a non-naturally occurring microbial organism of the invention can be produced by introducing exogenous enzyme or protein activities to obtain a desired biosynthetic pathway or a desired biosynthetic pathway can be obtained by introducing one or more exogenous enzyme or protein activities that, together with one or more endogenous enzymes or proteins, produces a desired product such as 4-HB, 4-HBal, 4-HBCoA, BDO and/or putrescine.

[0209] In like fashion, where 4-HB biosynthesis is selected to occur through the succinate to succinyl-CoA pathway (the succinyl-CoA pathway), encoding nucleic acids for host deficiencies in the enzymes succinyl-CoA synthetase, CoA-dependent succinic semialdehyde dehydrogenase and/or 4-hydroxybutanoate dehydrogenase are to be exogenously expressed in the recipient host. Selection of 4-HB biosynthesis through the α-ketoglutarate to succinic semialdehyde pathway (the α-ketoglutarate pathway) can utilize exogenous expression for host deficiencies in one or more of the enzymes for glutamate:succinic semialdehyde transaminase, glutamate decarboxylase and/or 4-hydroxybutanoate dehydrogenase, or α-ketoglutarate decarboxylase and 4-hydroxybutanoate dehydrogenase. One skilled in the art can readily determine pathway enzymes for production of 4-HB or BDO, as disclosed herein.

[0210] Depending on the 4-HB, 4-HBal, 4-HBCoA, BDO or putrescine biosynthetic pathway constituents of a selected host microbial organism, the non-naturally occurring microbial organisms of the invention will include at least one exogenously expressed 4-HB, 4-HB, 4-HBCoA, BDO or putrescine pathway-encoding nucleic acid and up to all encoding nucleic acids for one or more 4-HB or BDO biosynthetic pathways. For example, 4-HB, 4-HBal, 4-HBCoA, BDO or putrescine biosynthesis can be established in a host deficient in a pathway enzyme or protein through exogenous expression of the corresponding encoding nucleic acid. In a host deficient in all enzymes or proteins of a 4-HB, 4-HB, 4-HBCoA, BDO or putrescine pathway, exogenous expression of all enzyme or proteins in the pathway can be included, although it is understood that all enzymes or proteins of a pathway can be expressed even if the host contains at least one of the pathway enzymes or proteins. If desired, exogenous expression of all enzymes or proteins in a pathway for production of 4-HB, 4-HB, 4-HBCoA, BDO or putrescine can be included. For example, 4-HB biosynthesis can be established from all five pathways in a host deficient in 4-hydroxybutanoate dehydrogenase through exogenous expression of a 4-hydroxybutanoate dehydrogenase encoding nucleic acid. In contrast, 4-HB biosynthesis can be established from all five pathways in a host deficient in all eight enzymes through exogenous expression of all eight of CoA-independent succinic semialdehyde dehydrogenase, succinyl-CoA synthetase, CoA-dependent succinic semialdehyde dehydrogenase, glutamate:succinic semialdehyde transaminase, glutamate decarboxylase, α-ketoglutarate decarboxylase, α-ketoglutarate dehydrogenase and 4-hydroxybutanoate dehydrogenase.

[0211] Given the teachings and guidance provided herein, those skilled in the art will understand that the number of encoding nucleic acids to introduce in an expressible form will, at least, parallel 4-HB, 4-HBal, 4-HBCoA, BDO or putrescine pathway deficiencies of the selected host microbial organism. Therefore, a non-naturally occurring microbial organism of the invention can have one, two, three, four, five, six, seven, eight or up to all nucleic acids encoding the enzymes disclosed herein constituting one or more 4-HB, 4-HBal, 4-HBCoA, BDO or putrescine biosynthetic pathways. In some embodiments, the non-naturally occurring microbial organisms also can include other genetic modifications that facilitate or optimize 4-HB, 4-HBal, 4-HBCoA, BDO or putrescine biosynthesis or that confer other useful functions onto the host microbial organism. One such other functionality can include, for example, augmentation of the synthesis of one or more of 4-HB pathway precursors such as succinate, succinyl-CoA, α-ketoglutarate, 4-aminobutyrate, glutamate, acetoacetyl-CoA, and/or homoserine.

[0212] Generally, a host microbial organism is selected such that it produces the precursor of a 4-HB, 4-HBal, 4-HBCoA, BDO or putrescine pathway, either as a naturally produced molecule or as an engineered product that either provides de novo production of a desired precursor or increased production of a precursor naturally produced by the host microbial organism. For example, succinyl-CoA, α-ketoglutarate, 4-aminobutyrate, glutamate, acetoacetyl-CoA, and homoserine are produced naturally in a host organism such as E. coli. A host organism can be engineered to increase production of a precursor, as disclosed herein. In addition, a microbial organism that has been engineered to produce a desired precursor can be used as a host organism and further engineered to express enzymes or proteins of a 4-HB, 4-HBal, 4-HBCoA, BDO or putrescine pathway.

[0213] In some embodiments, a non-naturally occurring microbial organism of the invention is generated from a host that contains the enzymatic capability to synthesize 4-HB, 4-HBal, 4-HBCoA, BDO or putrescine. In this specific embodiment it can be useful to increase the synthesis or accumulation of a 4-HB, 4-HBal, 4-HBCoA, BDO or putrescine pathway product to, for example, drive 4-HB, 4-HBal, 4-HBCoA, BDO or putrescine pathway reactions toward 4-HB, 4-HBal, 4-HBCoA, BDO or putrescine production. Increased synthesis or accumulation can be accomplished by, for example, overexpression of nucleic acids encoding one or more of the 4-HB, 4-HBal, 4-HBCoA, BDO or putrescine pathway enzymes disclosed herein. Over expression of the 4-HB, 4-HBal, 4-HBCoA, BDO or putrescine pathway enzyme or enzymes can occur, for example, through exogenous expression of the endogenous gene or genes, or through exogenous expression of the heterologous gene or genes. Therefore, naturally occurring organisms can be readily generated to be non-naturally 4-HB, 4-HBal, 4-HBCoA, BDO or putrescine producing microbial organisms of the invention through overexpression of one, two, three, four, five, six and so forth up to all nucleic acids encoding 4-HB, 4-HBal, 4-HBCoA, BDO or putrescine biosynthetic pathway enzymes. In addition, a non-naturally occurring organism can be generated by mutagenesis of an endogenous gene that results in an increase in activity of an enzyme in the 4-HB, 4-HBal, 4-HBCoA, BDO or putrescine biosynthetic pathway.

[0214] In particularly useful embodiments, exogenous expression of the encoding nucleic acids is employed. Exogenous expression confers the ability to custom tailor the expression and/or regulatory elements to the host and application to achieve a desired expression level that is controlled by the user. However, endogenous expression also can be utilized in other embodiments such as by removing a negative regulatory effector or induction of the gene's promoter when linked to an inducible promoter or other regulatory element. Thus, an endogenous gene having a naturally occurring inducible promoter can be up-regulated by providing the appropriate inducing agent, or the regulatory region of an endogenous gene can be engineered to incorporate an inducible regulatory element, thereby allowing the regulation of increased expression of an endogenous gene at a desired time. Similarly, an inducible promoter can be included as a regulatory element for an exogenous gene introduced into a non-naturally occurring microbial organism (see Examples).

[0215] “Exogenous” as it is used herein is intended to mean that the referenced molecule or the referenced activity is introduced into the host microbial organism. The molecule can be introduced, for example, by introduction of an encoding nucleic acid into the host genetic material such as by integration into a host chromosome or as non-chromosomal genetic material such as a plasmid. Therefore, the term as it is used in reference to expression of an encoding nucleic acid refers to introduction of the encoding nucleic acid in an expressible form into the microbial organism. When used in reference to a biosynthetic activity, the term refers to an activity that is introduced into the host reference organism. The source can be, for example, a homologous or heterologous encoding nucleic acid that expresses the referenced activity following introduction into the host microbial organism. Therefore, the term “endogenous” refers to a referenced molecule or activity that is present in the host. Similarly, the term when used in reference to expression of an encoding nucleic acid refers to expression of an encoding nucleic acid contained within the microbial organism. The term “heterologous” refers to a molecule or activity derived from a source other than the referenced species whereas “homologous” refers to a molecule or activity derived from the host microbial organism. Accordingly, exogenous expression of an encoding nucleic acid of the invention can utilize either or both a heterologous or homologous encoding nucleic acid.

[0216] It is understood that when more than one exogenous nucleic acid is included in a microbial organism that the the more than one exogenous nucleic acids refers to the referenced encoding nucleic acid or biosynthetic activity, as discussed above. It is further understood, as disclosed herein, that such more than one exogenous nucleic acids can be introduced into the host microbial organism on separate nucleic acid molecules, on polycistronic nucleic acid molecules, or a combination thereof, and still be considered as more than one exogenous nucleic acid. For example, as disclosed herein a microbial organism can be engineered to express two or more exogenous nucleic acids encoding a desired pathway enzyme or protein. In the case where two exogenous nucleic acids encoding a desired activity are introduced into a host microbial organism, it is understood that the two exogenous nucleic acids can be introduced as a single nucleic acid, for example, on a single plasmid, on separate plasmids, can be integrated into the host chromosome at a single site or multiple sites, and still be considered as two exogenous nucleic acids. Similarly, it is understood that more than two exogenous nucleic acids can be introduced into a host organism in any desired combination, for example, on a single plasmid, on separate plasmids, can be integrated into the host chromosome at a single site or multiple sites, and still be considered as two or more exogenous nucleic acids, for example three exogenous nucleic acids. Thus, the number of referenced exogenous nucleic acids or biosynthetic activities refers to the number of encoding nucleic acids or the number of biosynthetic activities, not the number of separate nucleic acids introduced into the host organism.

[0217] As used herein, the term “gene disruption,” or grammatical equivalents thereof, is intended to mean a genetic alteration that renders the encoded gene product inactive or attenuated. The genetic alteration can be, for example, deletion of the entire gene, deletion of a regulatory sequence required for transcription or translation, deletion of a portion of the gene which results in a truncated gene product, or by any of various mutation strategies that inactivate or attenuate the encoded gene product. One particularly useful method of gene disruption is complete gene deletion because it reduces or eliminates the occurrence of genetic reversions in the non-naturally occurring microorganisms of the invention. A gene disruption also includes a null mutation, which refers to a mutation within a gene or a region containing a gene that results in the gene not being transcribed into RNA and/or translated into a functional gene product. Such a null mutation can arise from many types of mutations including, for example, inactivating point mutations, deletion of a portion of a gene, entire gene deletions, or deletion of chromosomal segments.

[0218] As used herein, the term “attenuate,” or grammatical equivalents thereof, is intended to mean to weaken, reduce or diminish the activity or amount of an enzyme or protein. Attenuation of the activity or amount of an enzyme or protein can mimic complete disruption if the attenuation causes the activity or amount to fall below a critical level required for a given pathway to function. However, the attenuation of the activity or amount of an enzyme or protein that mimics complete disruption for one pathway, can still be sufficient for a separate pathway to continue to function. For example, attenuation of an endogenous enzyme or protein can be sufficient to mimic the complete disruption of the same enzyme or protein for production of a 4-HB, 4-HBal, 4-HBCoA, BDO or putrescine of the invention, but the remaining activity or amount of enzyme or protein can still be sufficient to maintain other pathways, such as a pathway that is critical for the host microbial organism to survive, reproduce or grow. Attenuation of an enzyme or protein can also be weakening, reducing or diminishing the activity or amount of the enzyme or protein in an amount that is sufficient to increase yield of a 4-HB, 4-HBal, 4-HBCoA, BDO or putrescine of the invention, but does not necessarily mimic complete disruption of the enzyme or protein.

[0219] As used herein, the term “growth-coupled” when used in reference to the production of a biochemical product is intended to mean that the biosynthesis of the referenced biochemical product is produced during the growth phase of a microorganism. In a particular embodiment, the growth-coupled production can optionally be obligatory, meaning that the biosynthesis of the referenced biochemical is an obligatory product produced during the growth phase of a microorganism.

[0220] Sources of encoding nucleic acids for a 4-HB, 4-HBal, 4-HBCoA, BDO or putrescine pathway enzyme can include, for example, any species where the encoded gene product is capable of catalyzing the referenced reaction. Such species include both prokaryotic and eukaryotic organisms including, but not limited to, bacteria, including archaea and eubacteria, and eukaryotes, including yeast, plant, insect, animal, and mammal, including human. Exemplary species for such sources include, for example, Escherichia coli, Saccharomyces cerevisiae, Saccharomyces kluyveri, Clostridium kluyveri, Clostridium acetobutylicum, Clostridium beijerinckii, Clostridium saccharoperbutylacetonicum, Clostridium perfringens, Clostridium difficile, Clostridium botulinum, Clostridium tyrobutyricum, Clostridium tetanomorphum, Clostridium tetani, Clostridium propionicum, Clostridium aminobutyricum, Clostridium subterminale, Clostridium sticklandii, Ralstonia eutropha, Mycobacterium bovis, Mycobacterium tuberculosis, Porphyromonas gingivalis, Arabidopsis thaliana, Thermus thermophilus, Pseudomonas species, including Pseudomonas aeruginosa, Pseudomonas putida, Pseudomonas stutzeri, Pseudomonas fluorescens, Homo sapiens, Oryctolagus cuniculus, Rhodobacter spaeroides, Thermoanaerobacter brockii, Metallosphaera sedula, Leuconostoc mesenteroides, Chloroflexus aurantiacus, Roseiflexus castenholzii, Erythrobacter, Simmondsia chinensis, Acinetobacter species, including Acinetobacter calcoaceticus and Acinetobacter baylyi, Porphyromonas gingivalis, Sulfolobus tokodaii, Sulfolobus solfataricus, Sulfolobus acidocaldarius, Bacillus subtilis, Bacillus cereus, Bacillus megaterium, Bacillus brevis, Bacillus pumilus, Rattus norvegicus, Klebsiella pneumonia, Klebsiella oxytoca, Euglena gracilis, Treponema denticola, Moorella thermoacetica, Thermotoga maritima, Halobacterium salinarum, Geobacillus stearothermophilus, Aeropyrum pernix, Sus scrofa, Caenorhabditis elegans, Corynebacterium glutamicum, Acidaminococcus fermentans, Lactococcus lactis, Lactobacillus plantarum, Streptococcus thermophilus, Enterobacter aerogenes, Candida, Aspergillus terreus, Pedicoccus pentosaceus, Zymomonas mobilus, Acetobacter pasteurians, Kluyveromyces lactis, Eubacterium barkeri, Bacteroides capillosus, Anaerotruncus colihominis, Natranaerobius thermophilusm, Campylobacter jejuni, Haemophilus influenzae, Serratia marcescens, Citrobacter amalonaticus, Myxococcus xanthus, Fusobacterium nuleatum, Penicillium chrysogenum, marine gamma proteobacterium, butyrate-producing bacterium, Nocardia iowensis, Nocardia farcinica, Streptomyces griseus, Schizosaccharomyces pombe, Geobacillus thermoglucosidasius, Salmonella typhimurium, Vibrio cholera, Heliobacter pylori, Nicotiana tabacum, Oryza saliva, Haloferax mediterranei, Agrobacterium tumefaciens, Achromobacter denitrificans, Fusobacterium nucleatum, Streptomyces clavuligenus, Acinetobacter baumanii, Mus musculus, Lachancea kluyveri, Trichomonas vaginalis, Trypanosoma brucei, Pseudomonas stutzeri, Braclyrhizobium japonicum, Mesorhizobium loti, Bos taurus, Nicotiana glutinosa, Vibrio vulnificus, Selenomonas ruminantium, Vibrio parahaemolyticus, Archaeoglobus fulgidus, Haloarcula marismortui, Pyrobaculum aerophilum, Mycobacterium smegmatis MC2 155, Mycobacterium avium subsp. paratuberculosis K-10, Mycobacterium marinum M, Tsukamurella paurometabola DSM 20162, Cyanobium PCC7001, Dictyostelium discoideum AX4, and others disclosed herein (see Examples). For example, microbial organisms having 4-HB, 4-HBal, 4-HBCoA, BDO or putrescine biosynthetic production are exemplified herein with reference to E. coli and yeast hosts. However, with the complete genome sequence available for now more than 550 species (with more than half of these available on public databases such as the NCBI), including 395 microorganism genomes and a variety of yeast, fungi, plant, and mammalian genomes, the identification of genes encoding the requisite 4-HB, 4-HBal, 4-HBCoA, BDO or putrescine biosynthetic activity for one or more genes in related or distant species, including for example, homologues, orthologs, paralogs and nonorthologous gene displacements of known genes, and the interchange of genetic alterations between organisms is routine and well known in the art. Accordingly, the metabolic alterations allowing biosynthesis of 4-HB, 4-HBal, 4-HBCoA, BDO or putrescine and other compounds of the invention described herein with reference to a particular organism such as E. coli or yeast can be readily applied to other microorganisms, including prokaryotic and eukaryotic organisms alike. Given the teachings and guidance provided herein, those skilled in the art will know that a metabolic alteration exemplified in one organism can be applied equally to other organisms.

[0221] In some instances, such as when an alternative 4-HB, 4-HBal, BDO or putrescine biosynthetic pathway exists in an unrelated species, 4-HB, 4-HBal, BDO or putrescine biosynthesis can be conferred onto the host species by, for example, exogenous expression of a paralog or paralogs from the unrelated species that catalyzes a similar, yet non-identical metabolic reaction to replace the referenced reaction. Because certain differences among metabolic networks exist between different organisms, those skilled in the art will understand that the actual gene usage between different organisms may differ. However, given the teachings and guidance provided herein, those skilled in the art also will understand that the teachings and methods of the invention can be applied to all microbial organisms using the cognate metabolic alterations to those exemplified herein to construct a microbial organism in a species of interest that will synthesize 4-HB, such as monomeric 4-HB, 4-HBal, BDO or putrescine.

[0222] Host microbial organisms can be selected from, and the non-naturally occurring microbial organisms generated in, for example, bacteria, yeast, fungus or any of a variety of other microorganisms applicable to fermentation processes. Exemplary bacteria include any species selected from the order Enterobacteriales, family Enterobacteriaceae, including the genera Escherichia and Klebsiella; the order Aeromonadales, family Succinivibrionaceae, including the genus Anaerobiospirillum; the order Pasteurellales, family Pasteurellaceae, including the genera Actinobacillus and Mannheimia; the order Rhizobiales, family Braclyrhizobiaceae, including the genus Rhizobium; the order Bacillales, family Bacillaceae, including the genus Bacillus; the order Actinomycetales, families Carynebacteri aceae and Streptomycetaceae, including the genus Corynebacterium and the genus Streptomyces, respectively; order Rhodospirillales, family Acetobacteraceae, including the genus Gluconobacter; the order Sphingomonaclales, family Sphingomonadaceae, including the genus Zymomonas; the order Lactobacillales, families Lactobacillaceae and Streptococcaceae, including the genus Lactobacillus and the genus Lactococcus, respectively; the order Clostridiales, family Clostridiaceae, genus Clostridium; and the order Pseudomonadales, family Pseudomonadaceae, including the genus Pseudomonas. Non-limiting species of host bacteria include Escherichia coli, Klebsiella oxytoca, Anaerobiospirillum succiniciproducens, Actinobacillus succinogenes, Mannheimia succiniciproducens, Rhizobium etli, Bacillus subtilis, Corynebacterium glutamicum, Gluconobacter oxydans, Zymomonas mobilis, Lactococcus lactis, Lactobacillus plantarum, Streptomyces coelicolor, Clostridium acetobutylicum, Pseudomonas fluorescens, and Pseudomonas putida.

[0223] Similarly, exemplary species of yeast or fungi species include any species selected from the order Saccharomycetales, family Saccaromycetaceae, including the genera Saccharomyces, Kluyveromyces and Pichia; the order Saccharomycetales, family Dipoclascaceae, including the genus Yarrowia; the order Schizosaccharomycetales, family Schizosaccaromycetaceae, including the genus Schizosaccharomyces; the order Eurotiales, family Trichocomaceae, including the genus Aspergillus; and the order Mucorales, family Mucoraceae, including the genus Rhizopus. Non-limiting species of host yeast or fungi include Saccharomyces cerevisiae, Schizosaccharomyces pombe, Kluyveromyces lactis, Kluyveromyces marxianus, Aspergillus terreus, Aspergillus niger, Pichia pastoris, Rhizopus arrhizus, Rhizopus oryzae, Yarrowia lipolytica, and the like. E. coli is a particularly useful host organism since it is a well characterized microbial organism suitable for genetic engineering. Other particularly useful host organisms include yeast such as Saccharomyces cerevisiae. It is understood that any suitable microbial host organism can be used to introduce metabolic and/or genetic modifications to produce a desired product.

[0224] Methods for constructing and testing the expression levels of a non-naturally occurring 4-HB-, 4-HBal-, 4-HBCoA-, BDO-, or putrescine-producing host can be performed, for example, by recombinant and detection methods well known in the art. Such methods can be found described in, for example, Sambrook et al., Molecular Cloning: A Laboratory Manual, Third Ed., Cold Spring Harbor Laboratory, New York (2001); Ausubel et al., Current Protocols in Molecular Biology, John Wiley and Sons, Baltimore, Md. (1999). 4-HB and GBL can be separated by, for example, HPLC using a Spherisorb 5 ODS1 column and a mobile phase of 70% 10 mM phosphate buffer (pH=7) and 30% methanol, and detected using a UV detector at 215 nm (Hennessy et al. 2004, J. Forensic Sci. 46(6):1-9). BDO is detected by gas chromatography or by HPLC and refractive index detector using an Aminex HPX-87H column and a mobile phase of 0.5 mM sulfuric acid (Gonzalez-Pajuelo et al., Met. Eng. 7:329-336 (2005)).

[0225] Exogenous nucleic acid sequences involved in a pathway for production of 4-HB, 4-HBal, 4-HBCoA, BDO or putrescine can be introduced stably or transiently into a host cell using techniques well known in the art including, but not limited to, conjugation, electroporation, chemical transformation, transduction, transfection, and ultrasound transformation. For exogenous expression in E. coli or other prokaryotic cells, some nucleic acid sequences in the genes or cDNAs of eukaryotic nucleic acids can encode targeting signals such as an N-terminal mitochondrial or other targeting signal, which can be removed before transformation into prokaryotic host cells, if desired. For example, removal of a mitochondrial leader sequence led to increased expression in E. coli (Hoffmeister et al., J. Biol. Chem. 280:4329-4338 (2005)). For exogenous expression in yeast or other eukaryotic cells, genes can be expressed in the cytosol without the addition of leader sequence, or can be targeted to mitochondrion or other organelles, or targeted for secretion, by the addition of a suitable targeting sequence such as a mitochondrial targeting or secretion signal suitable for the host cells. Thus, it is understood that appropriate modifications to a nucleic acid sequence to remove or include a targeting sequence can be incorporated into an exogenous nucleic acid sequence to impart desirable properties. Furthermore, genes can be subjected to codon optimization with techniques well known in the art to achieve optimized expression of the proteins.

[0226] An expression vector or vectors can be constructed to harbor one or more 4-HB, 4-HBal, 4-HBCoA, BDO or putrescine biosynthetic pathway and/or one or more biosynthetic encoding nucleic acids as exemplified herein operably linked to expression control sequences functional in the host organism. Expression vectors applicable for use in the microbial host organisms of the invention include, for example, plasmids, phage vectors, viral vectors, episomes and artificial chromosomes, including vectors and selection sequences or markers operable for stable integration into a host chromosome. Additionally, the expression vectors can include one or more selectable marker genes and appropriate expression control sequences. Selectable marker genes also can be included that, for example, provide resistance to antibiotics or toxins, complement auxotrophic deficiencies, or supply critical nutrients not in the culture media. Expression control sequences can include constitutive and inducible promoters, transcription enhancers, transcription terminators, and the like which are well known in the art. When two or more exogenous encoding nucleic acids are to be co-expressed, both nucleic acids can be inserted, for example, into a single expression vector or in separate expression vectors. For single vector expression, the encoding nucleic acids can be operationally linked to one common expression control sequence or linked to different expression control sequences, such as one inducible promoter and one constitutive promoter. The transformation of exogenous nucleic acid sequences involved in a metabolic or synthetic pathway can be confirmed using methods well known in the art. Such methods include, for example, nucleic acid analysis such as Northern blots or polymerase chain reaction (PCR) amplification of mRNA, or immunoblotting for expression of gene products, or other suitable analytical methods to test the expression of an introduced nucleic acid sequence or its corresponding gene product. It is understood by those skilled in the art that the exogenous nucleic acid is expressed in a sufficient amount to produce the desired product, and it is further understood that expression levels can be optimized to obtain sufficient expression using methods well known in the art and as disclosed herein.

[0227] The non-naturally occurring microbial organisms of the invention are constructed using methods well known in the art as exemplified herein to exogenously express at least one nucleic acid encoding a 4-HB, 4-HBal, 4-HBCoA, BDO or putrescine pathway enzyme in sufficient amounts to produce 4-HB, such as monomeric 4-HB, 4-HBal, 4-HBCoA, BDO or putrescine. It is understood that the microbial organisms of the invention are cultured under conditions sufficient to produce 4-HB, 4-HBal, 4-HBCoA, BDO or putrescine. Exemplary levels of expression for 4-HB, 4-HBal, 4-HBCoA, BDO or putrescine enzymes in each pathway are described further below in the Examples. Following the teachings and guidance provided herein, the non-naturally occurring microbial organisms of the invention can achieve biosynthesis of 4-HB, such as monomeric 4-HB, 4-HBal, 4-HBCoA, BDO or putrescine resulting in intracellular concentrations between about 0.1-200 mM or more, for example, 0.1-25 mM or more. Generally, the intracellular concentration of 4-HB, such as monomeric 4-HB, 4-HBal, 4-HBCoA, BDO or putrescine is between about 3-150 mM or more, particularly about 5-125 mM or more, and more particularly between about 8-100 mM, for example, about 3-20 mM, particularly between about 5-15 mM and more particularly between about 8-12 mM, including about 10 mM, 20 mM, 50 mM, 80 mM or more. Intracellular concentrations between and above each of these exemplary ranges also can be achieved from the non-naturally occurring microbial organisms of the invention. In particular embodiments, the microbial organisms of the invention, particularly strains such as those disclosed herein (see Examples XII-XIX and Table 18), can provide improved production of a desired product such as 4-HB, 4-HBal, 4-HBCoA, BDO or putrescine by increasing the production of 4-HB, 4-HBal, 4-HBCoA, BDO or putrescine and/or decreasing undesirable byproducts. Such production levels include, but are not limited to, those disclosed herein and including from about 1 gram to about 25 grams per liter, for example about 2, 3, 4, 5, 6, 7, 8, 9, 10, 11, 12, 13, 14, 15, 16, 17, 18, 19, 20, 21, 22, 23, 24, or even higher amounts of product per liter.

[0228] In addition to the culturing and fermentation conditions disclosed herein, growth condition for achieving biosynthesis of BDO, 4-HB, 4-HBCoA, 4-HBal and/or putrescine can include the addition of an osmoprotectant to the culturing conditions. In certain embodiments, the non-naturally occurring microbial organisms of the invention can be sustained, cultured or fermented as described herein in the presence of an osmoprotectant. Briefly, an osmoprotectant refers to a compound that acts as an osmolyte and helps a microbial organism as described herein survive osmotic stress. Osmoprotectants include, but are not limited to, betaines, amino acids, and the sugar trehalose. Non-limiting examples of such are glycine betaine, praline betaine, dimethylthetin, dimethylslfonioproprionate, 3-dimethylsulfonio-2-methylproprionate, pipecolic acid, dimethylsulfonioacetate, choline, L-camitine and ectoine. In one aspect, the osmoprotectant is glycine betaine. It is understood to one of ordinary skill in the art that the amount and type of osmoprotectant suitable for protecting a microbial organism described herein from osmotic stress will depend on the microbial organism used. The amount of osmoprotectant in the culturing conditions can be, for example, no more than about 0.1 mM, no more than about 0.5 mM, no more than about 1.0 mM, no more than about 1.5 mM, no more than about 2.0 mM, no more than about 2.5 mM, no more than about 3.0 mM, no more than about 5.0 mM, no more than about 7.0 mM, no more than about 10 mM, no more than about 50 mM, no more than about 100 mM or no more than about 500 mM.

[0229] In some embodiments, culture conditions include anaerobic or substantially anaerobic growth or maintenance conditions. Exemplary anaerobic conditions have been described previously and are well known in the art. Exemplary anaerobic conditions for fermentation processes are described herein and are described, for example, in U.S. publication 2009/0047719, filed Aug. 10, 2007. Any of these conditions can be employed with the non-naturally occurring microbial organisms as well as other anaerobic conditions well known in the art. Under such anaerobic conditions or substantially anaerobic, the 4-HB, 4-HBal, 4-HBCoA, BDO or putrescine producers can synthesize 4-HB, 4-HBal, 4-HBCoA, BDO or putrescine at intracellular concentrations of 5-10 mM or more as well as all other concentrations exemplified herein. It is understood that, even though the above description refers to intracellular concentrations, 4-HB, 4-HBal, 4-HBCoA, BDO or putrescine producing microbial organisms can produce 4-HB, 4-HBal, 4-HBCoA, BDO or putrescine intracellularly and/or secrete the product into the culture medium.

[0230] Exemplary fermentation processes include, but are not limited to, fed-batch fermentation and batch separation; fed-batch fermentation and continuous separation; and continuous fermentation and continuous separation. In an exemplary batch fermentation protocol, the production organism is grown in a suitably sized bioreactor sparged with an appropriate gas. Under anaerobic conditions, the culture is sparged with an inert gas or combination of gases, for example, nitrogen, N₂/CO₂ mixture, argon, helium, and the like. As the cells grow and utilize the carbon source, additional carbon source(s) and/or other nutrients are fed into the bioreactor at a rate approximately balancing consumption of the carbon source and/or nutrients. The temperature of the bioreactor is maintained at a desired temperature, generally in the range of 22-37 degrees C., but the temperature can be maintained at a higher or lower temperature depending on the the growth characteristics of the production organism and/or desired conditions for the fermentation process. Growth continues for a desired period of time to achieve desired characteristics of the culture in the fermenter, for example, cell density, product concentration, and the like. In a batch fermentation process, the time period for the fermentation is generally in the range of several hours to several days, for example, 8 to 24 hours, or 1, 2, 3, 4 or 5 days, or up to a week, depending on the desired culture conditions. The pH can be controlled or not, as desired, in which case a culture in which pH is not controlled will typically decrease to pH 3-6 by the end of the run. Upon completion of the cultivation period, the fermenter contents can be passed through a cell separation unit, for example, a centrifuge, filtration unit, and the like, to remove cells and cell debris. In the case where the desired product is expressed intracellularly, the cells can be lysed or disrupted enzymatically or chemically prior to or after separation of cells from the fermentation broth, as desired, in order to release additional product. The fermentation broth can be transferred to a product separations unit. Isolation of product occurs by standard separations procedures employed in the art to separate a desired product from dilute aqueous solutions. Such methods include, but are not limited to, liquid-liquid extraction using a water immiscible organic solvent (e.g, toluene or other suitable solvents, including but not limited to diethyl ether, ethyl acetate, tetrahydrofuran (THF), methylene chloride, chloroform, benzene, pentane, hexane, heptane, petroleum ether, methyl tertiary butyl ether (MTBE), dioxane, dimethylformamide (DMF), dimethyl sulfoxide (DMSO), and the like) to provide an organic solution of the product, if appropriate, standard distillation methods, and the like, depending on the chemical characteristics of the product of the fermentation process.

[0231] In an exemplary fully continuous fermentation protocol, the production organism is generally first grown up in batch mode in order to achieve a desired cell density. When the carbon source and/or other nutrients are exhausted, feed medium of the same composition is supplied continuously at a desired rate, and fermentation liquid is withdrawn at the same rate. Under such conditions, the product concentration in the bioreactor generally remains constant, as well as the cell density. The temperature of the fermenter is maintained at a desired temperature, as discussed above. During the continuous fermentation phase, it is generally desirable to maintain a suitable pH range for optimized production. The pH can be monitored and maintained using routine methods, including the addition of suitable acids or bases to maintain a desired pH range. The bioreactor is operated continuously for extended periods of time, generally at least one week to several weeks and up to one month, or longer, as appropriate and desired. The fermentation liquid and/or culture is monitored periodically, including sampling up to every day, as desired, to assure consistency of product concentration and/or cell density. In continuous mode, fermenter contents are constantly removed as new feed medium is supplied. The exit stream, containing cells, medium, and product, are generally subjected to a continuous product separations procedure, with or without removing cells and cell debris, as desired. Continuous separations methods employed in the art can be used to separate the product from dilute aqueous solutions, including but not limited to continuous liquid-liquid extraction using a water immiscible organic solvent (e.g., toluene or other suitable solvents, including but not limited to diethyl ether, ethyl acetate, tetrahydrofuran (THF), methylene chloride, chloroform, benzene, pentane, hexane, heptane, petroleum ether, methyl tertiary butyl ether (MTBE), dioxane, dimethylformamide (DMF), dimethyl sulfoxide (DMSO), and the like), standard continuous distillation methods, and the like, or other methods well known in the art.

[0232] In some embodiments, the carbon feedstock and other cellular uptake sources such as phosphate, ammonia, sulfate, chloride and other halogens can be chosen to alter the isotopic distribution of the atoms present in 4-HB, 4-HBal, 4-HBCoA, BDO or putrescine or any 4-HB, 4-HBal, 4-HBCoA, BDO or putrescine pathway intermediate. The various carbon feedstock and other uptake sources enumerated above will be referred to herein, collectively, as “uptake sources.” Uptake sources can provide isotopic enrichment for any atom present in the product 4-HB, 4-HBal, 4-HBCoA, BDO or putrescine or 4-HB, 4-HBal, 4-HBCoA, BDO or putrescine pathway intermediate including any 4-HB, 4-HBal, 4-HBCoA, BDO or putrescine impurities generated in diverging away from the pathway at any point. Isotopic enrichment can be achieved for any target atom including, for example, carbon, hydrogen, oxygen, nitrogen, sulfur, phosphorus, chloride or other halogens.

[0233] In some embodiments, the uptake sources can be selected to alter the carbon-12, carbon-13, and carbon-14 ratios. In some embodiments, the uptake sources can be selected to alter the oxygen-16, oxygen-17, and oxygen-18 ratios. In some embodiments, the uptake sources can be selected to alter the hydrogen, deuterium, and tritium ratios. In some embodiments, the uptake sources can be selected to alter the nitrogen-14 and nitrogen-15 ratios. In some embodiments, the uptake sources can be selected to alter the sulfur-32, sulfur-33, sulfur-34, and sulfur-35 ratios. In some embodiments, the uptake sources can be selected to alter the phosphorus-31, phosphorus-32, and phosphorus-33 ratios. In some embodiments, the uptake sources can be selected to alter the chlorine-35, chlorine-36, and chlorine-37 ratios.

[0234] In some embodiments, the isotopic ratio of a target atom can be varied to a desired ratio by selecting one or more uptake sources. An uptake source can be derived from a natural source, as found in nature, or from a man-made source, and one skilled in the art can select a natural source, a man-made source, or a combination thereof, to achieve a desired isotopic ratio of a target atom. An example of a man-made uptake source includes, for example, an uptake source that is at least partially derived from a chemical synthetic reaction. Such isotopically enriched uptake sources can be purchased commercially or prepared in the laboratory and/or optionally mixed with a natural source of the uptake source to achieve a desired isotopic ratio. In some embodiments, a target atom isotopic ratio of an uptake source can be achieved by selecting a desired origin of the uptake source as found in nature. For example, as discussed herein, a natural source can be a biobased derived from or synthesized by a biological organism or a source such as petroleum-based products or the atmosphere. In some such embodiments, a source of carbon, for example, can be selected from a fossil fuel-derived carbon source, which can be relatively depleted of carbon-14, or an environmental or atmospheric carbon source, such as CO₂, which can possess a larger amount of carbon-14 than its petroleum-derived counterpart.

[0235] The unstable carbon isotope carbon-14 or radiocarbon makes up for roughly 1 in 10¹² carbon atoms in the earth's atmosphere and has a half-life of about 5700 years. The stock of carbon is replenished in the upper atmosphere by a nuclear reaction involving cosmic rays and ordinary nitrogen (¹⁴N). Fossil fuels contain no carbon-14, as it decayed long ago. Burning of fossil fuels lowers the atmospheric carbon-14 fraction, the so-called “Suess effect”.

[0236] Methods of determining the isotopic ratios of atoms in a compound are well known to those skilled in the art. Isotopic enrichment is readily assessed by mass spectrometry using techniques known in the art such as accelerated mass spectrometry (AMS), Stable Isotope Ratio Mass Spectrometry (SIRMS) and Site-Specific Natural Isotopic Fractionation by Nuclear Magnetic Resonance (SNIF-NMR). Such mass spectral techniques can be integrated with separation techniques such as liquid chromatography (LC), high performance liquid chromatography (HPLC) and/or gas chromatography, and the like.

[0237] In the case of carbon, ASTM D6866 was developed in the United States as a standardized analytical method for determining the biobased content of solid, liquid, and gaseous samples using radiocarbon dating by the American Society for Testing and Materials (ASTM) International. The standard is based on the use of radiocarbon dating for the determination of a product's biobased content. ASTM D6866 was first published in 2004, and the current active version of the standard is ASTM D6866-11 (effective Apr. 1, 2011). Radiocarbon dating techniques are well known to those skilled in the art, including those described herein.

[0238] The biobased content of a compound is estimated by the ratio of carbon-14 (¹⁴C) to carbon-12 (¹²C). Specifically, the Fraction Modern (Fm) is computed from the expression: Fm=(S−B)/(M−B), where B, S and M represent the ¹⁴C/¹²C ratios of the blank, the sample and the modern reference, respectively. Fraction Modem is a measurement of the deviation of the ¹⁴C/¹²C ratio of a sample from “Modern.” Modern is defined as 95% of the radiocarbon concentration (in AD 1950) of National Bureau of Standards (NBS) Oxalic Acid I (i.e., standard reference materials (SRM) 4990b) normalized to δ¹³C_{VPDB}=−19 per mil. Olsson, The use of Oxalic acid as a Standard. in, Radiocarbon Variations and Absolute Chronology, Nobel Symposium, 12th Proc., John Wiley & Sons, New York (1970). Mass spectrometry results, for example, measured by ASM, are calculated using the internationally agreed upon definition of 0.95 times the specific activity of NBS Oxalic Acid I (SRM 4990b) normalized to δ¹³C_{VPDB}=−19 per mil. This is equivalent to an absolute (AD 1950) ¹⁴C/¹²C ratio of 1.176±0.010×10⁻¹² (Karlen et al., Arkiv Geoftsik, 4:465-471(1968)). The standard calculations take into account the differential uptake of one isotope with respect to another, for example, the preferential uptake in biological systems of C¹² over C¹³ over C¹⁴, and these corrections are reflected as a Fm corrected for δ¹³.

[0239] An oxalic acid standard (SRM 4990b or HOx 1) was made from a crop of 1955 sugar beet. Although there were 1000 lbs made, this oxalic acid standard is no longer commercially available. The Oxalic Acid II standard (HOx 2; N.I.S.T designation SRM 4990 C) was made from a crop of 1977 French beet molasses. In the early 1980's, a group of 12 laboratories measured the ratios of the two standards. The ratio of the activity of Oxalic acid II to 1 is 1.2933±0.001 (the weighted mean). The isotopic ratio of HOx II is −17.8 per mille. ASTM D6866-11 suggests use of the available Oxalic Acid II standard SRM 4990 C (Hox2) for the modern standard (see discussion of original vs. currently available oxalic acid standards in Mann, Radiocarbon, 25(2):519-527 (1983)). A Fm=0% represents the entire lack of carbon-14 atoms in a material, thus indicating a fossil (for example, petroleum based) carbon source. A Fm=100%, after correction for the post-1950 injection of carbon-14 into the atmosphere from nuclear bomb testing, indicates an entirely modern carbon source. As described herein, such a “modern” source includes biobased sources.

[0240] As described in ASTM D6866, the percent modern carbon (pMC) can be greater than 100% because of the continuing but diminishing effects of the 1950s nuclear testing programs, which resulted in a considerable enrichment of carbon-14 in the atmosphere as described in ASTM D6866-11. Because all sample carbon-14 activities are referenced to a “pre-bomb” standard, and because nearly all new biobased products are produced in a post-bomb environment, all pMC values (after correction for isotopic fraction) must be multiplied by 0.95 (as of 2010) to better reflect the true biobased content of the sample. A biobased content that is greater than 103% suggests that either an analytical error has occurred, or that the source of biobased carbon is more than several years old.

[0241] ASTM D6866 quantifies the biobased content relative to the material's total organic content and does not consider the inorganic carbon and other non-carbon containing substances present. For example, a product that is 50% starch-based material and 50% water would be considered to have a Biobased Content=100% (50% organic content that is 100% biobased) based on ASTM D6866. In another example, a product that is 50% starch-based material, 25% petroleum-based, and 25% water would have a Biobased Content=66.7% (75% organic content but only 50% of the product is biobased). In another example, a product that is 50% organic carbon and is a petroleum-based product would be considered to have a Biobased Content=0% (50% organic carbon but from fossil sources). Thus, based on the well known methods and known standards for determining the biobased content of a compound or material, one skilled in the art can readily determine the biobased content and/or prepared downstream products that utilize of the invention having a desired biobased content.

[0242] Applications of carbon-14 dating techniques to quantify bio-based content of materials are known in the art (Currie et al., Nuclear Instruments and Methods in Physics Research B, 172:281-287 (2000)). For example, carbon-14 dating has been used to quantify bio-based content in terephthalate-containing materials (Colonna et al., Green Chemistry, 13:2543-2548 (2011)). Notably, polypropylene terephthalate (PPT) polymers derived from renewable 1,3-propanediol and petroleum-derived terephthalic acid resulted in Fm values near 30% (i.e., since 3/11 of the polymeric carbon derives from renewable 1,3 propanediol and 8/11 from the fossil end member terephthalic acid) (Currie et al., supra, 2000). In contrast, polybutylene terephthalate polymer derived from both renewable 1,4-butanediol and renewable terephthalic acid resulted in bio-based content exceeding 90% (Colonna et al., supra, 2011).

[0243] Accordingly, in some embodiments, the present invention provides 4-HB, 4-HBal, 4-HBCoA, BDO or putrescine or a 4-HB, 4-HBal, 4-HBCoA, BDO or putrescine intermediate that has a carbon-12, carbon-13, and carbon-14 ratio that reflects an atmospheric carbon uptake source. For example, in some aspects the 4-HB, 4-HBal, 4-HBCoA, BDO or putrescine or a 4-HB, 4-HBal, 4-HBCoA, BDO or putrescine intermediate can have an Fm value of at least 10%, at least 15%, at least 20%, at least 25%, at least 30%, at least 35%, at least 40%, at least 45%, at least 50%, at least 55%, at least 60%, at least 65%, at least 70%, at least 75%, at least 80%, at least 85%, at least 90%, at least 95%, at least 98% or as much as 100%. In some such embodiments, the uptake source is CO₂. In some embodiments, the present invention provides 4-HB, 4-HBal, 4-HBCoA, BDO or putrescine or a 4-HB, 4-HBal, 4-HBCoA, BDO or putrescine intermediate that has a carbon-12, carbon-13, and carbon-14 ratio that reflects petroleum-based carbon uptake source. In this aspect, the 4-HB, 4-HBal, 4-HBCoA, BDO or putrescine or a 4-HB, 4-HBal, 4-HBCoA, BDO or putrescine intermediate can have an Fm value of less than 95%, less than 90%, less than 85%, less than 80%, less than 75%, less than 70%, less than 65%, less than 60%, less than 55%, less than 50%, less than 45%, less than 40%, less than 35%, less than 30%, less than 25%, less than 20%, less than 15%, less than 10%, less than 5%, less than 2% or less than 1%. In some embodiments, the present invention provides 4-HB, 4-HBal, 4-HBCoA, BDO or putrescine or a 4-HB, 4-HBal, 4-HBCoA, BDO or putrescine intermediate that has a carbon-12, carbon-13, and carbon-14 ratio that is obtained by a combination of an atmospheric carbon uptake source with a petroleum-based uptake source. Using such a combination of uptake sources is one way by which the carbon-12, carbon-13, and carbon-14 ratio can be varied, and the respective ratios would reflect the proportions of the uptake sources.

[0244] Further, the present invention relates to the biologically produced 4-HB, 4-HBal, 4-HBCoA, BDO or putrescine or 4-HB, 4-HBal, 4-HBCoA, BDO or putrescine intermediate as disclosed herein, and to the products derived therefrom, wherein the 4-HB, 4-HBal, 4-HBCoA, BDO or putrescine or a 4-HB, 4-HBal, 4-HBCoA, BDO or putrescine intermediate has a carbon-12, carbon-13, and carbon-14 isotope ratio of about the same value as the CO₂ that occurs in the environment. For example, in some aspects the invention provides: bioderived 4-HB, 4-HBal, 4-HBCoA, BDO or putrescine or a bioderived 4-HB, 4-HBal, 4-HBCoA, BDO or putrescine intermediate having a carbon-12 versus carbon-13 versus carbon-14 isotope ratio of about the same value as the CO₂ that occurs in the environment, or any of the other ratios disclosed herein. It is understood, as disclosed herein, that a product can have a carbon-12 versus carbon-13 versus carbon-14 isotope ratio of about the same value as the CO₂ that occurs in the environment, or any of the ratios disclosed herein, wherein the product is generated from bioderived 4-HB, 4-HBal, 4-HBCoA, BDO or putrescine or a bioderived 4-HB, 4-HBal, 4-HBCoA, BDO or putrescine intermediate as disclosed herein, wherein the bioderived product is chemically modified to generate a final product. Methods of chemically modifying a bioderived product of 4-HB, 4-HBal, 4-HBCoA, BDO or putrescine, or an intermediate thereof, to generate a desired product are well known to those skilled in the art, as described herein. The invention further provides plastics, elastic fibers, polyurethanes, polyesters, including polyhydroxyalkanoates such as poly-4-hydroxybutyrate (P4HB) or co-polymers thereof, poly(tetramethylene ether) glycol (PTMEG)(also referred to as PTMO, polytetramethylene oxide), polybutylene terephthalate (PBT), and polyurethane-polyurea copolymers, referred to as spandex, elastane or Lycra™, nylons, and the like, having a carbon-12 versus carbon-13 versus carbon-14 isotope ratio of about the same value as the CO₂ that occurs in the environment, wherein the plastics, elastic fibers, polyurethanes, polyesters, including polyhydroxyalkanoates such as poly-4-hydroxybutyrate (P4HB) or co-polymers thereof, poly(tetramethylene ether) glycol (PTMEG)(also referred to as PTMO, polytetramethylene oxide)polybutylene terephthalate (PBT), and polyurethane-polyurea copolymers, referred to as spandex, elastane or Lycra™, and nylons are generated directly from or in combination with bioderived 4-HB, 4-HBal, 4-HBCoA, BDO or putrescine or a bioderived 4-HB, 4-HBal, 4-HBCoA, BDO or putrescine intermediate as disclosed herein.

[0245] The products 4-HB, 4-HBal, 4-HBCoA, BDO or putrescine are chemicals commonly used in many commercial and industrial applications. Non-limiting examples of such applications include production of plastics, elastic fibers, polyurethanes, polyesters, including polyhydroxyalkanoates such as poly-4-hydroxybutyrate (P4HB) or co-polymers thereof, poly(tetramethylene ether) glycol (PTMEG)(also referred to as PTMO, polytetramethylene oxide), polybutylene terephthalate (PBT), and polyurethane-polyurea copolymers, referred to as spandex, elastane or Lycra™, and nylons. Moreover, 4-HB, 4-HBal, 4-HBCoA, BDO or putrescine are also used as a raw material in the production of a wide range of products including plastics, elastic fibers, polyurethanes, polyesters, including polyhydroxyalkanoates such as poly-4-hydroxybutyrate (P4HB) or co-polymers thereof, poly(tetramethylene ether) glycol (PTMEG)(also referred to as PTMO, polytetramethylene oxide), polybutylene terephthalate (PBT), and polyurethane-polyurea copolymers, referred to as spandex, elastane or Lycra™, nylons. Accordingly, in some embodiments, the invention provides biobased plastics, elastic fibers, polyurethanes, polyesters, including polyhydroxyalkanoates such as poly-4-hydroxybutyrate (P4HB) or co-polymers thereof, poly(tetramethylene ether) glycol (PTMEG)(also referred to as PTMO, polytetramethylene oxide), polybutylene terephthalate (PBT), and polyurethane-polyurea copolymers, referred to as spandex, elastane or Lycra™, nylons comprising one or more bioderived 4-HB, 4-HBal, 4-HBCoA, BDO or putrescine or bioderived 4-HB, 4-HBal, 4-HBCoA, BDO or putrescine intermediate produced by a non-naturally occurring microorganism of the invention or produced using a method disclosed herein.

[0246] As used herein, the term “bioderived” means derived from or synthesized by a biological organism and can be considered a renewable resource since it can be generated by a biological organism. Such a biological organism, in particular the microbial organisms of the invention disclosed herein, can utilize feedstock or biomass, such as, sugars or carbohydrates obtained from an agricultural, plant, bacterial, or animal source. Alternatively, the biological organism can utilize atmospheric carbon. As used herein, the term “biobased” means a product as described above that is composed, in whole or in part, of a bioderived compound of the invention. A biobased or bioderived product is in contrast to a petroleum derived product, wherein such a product is derived from or synthesized from petroleum or a petrochemical feedstock.

[0247] In some embodiments, the invention provides plastics, elastic fibers, polyurethanes, polyesters, including polyhydroxyalkanoates such as poly-4-hydroxybutyrate (P4HB) or co-polymers thereof, poly(tetramethylene ether) glycol (PTMEG)(also referred to as PTMO, polytetramethylene oxide), polybutylene terephthalate (PBT), and polyurethane-polyurea copolymers, referred to as spandex, elastane or Lycra™, nylons comprising bioderived 4-HB, 4-HBal, 4-HBCoA, BDO or putrescine or bioderived 4-HB, 4-HBal, 4-HBCoA, BDO or putrescine intermediate, wherein the bioderived 4-HB, 4-HBal, 4-HBCoA, BDO or putrescine or bioderived 4-HB, 4-HBal, 4-HBCoA, BDO or putrescine intermediate includes all or part of the 4-HB, 4-HBal, 4-HBCoA, BDO or putrescine or 4-HB, 4-HBal, 4-HBCoA, BDO or putrescine intermediate used in the production of plastics, elastic fibers, polyurethanes, polyesters, including polyhydroxyalkanoates such as poly-4-hydroxybutyrate (P4HB) or co-polymers thereof, poly(tetramethylene ether) glycol (PTMEG)(also referred to as PTMO, polytetramethylene oxide), polybutylene terephthalate (PBT), and polyurethane-polyurea copolymers, referred to as spandex, elastane or Lycra™, and nylons. Thus, in some aspects, the invention provides a biobased plastics, elastic fibers, polyurethanes, polyesters, including polyhydroxyalkanoates such as poly-4-hydroxybutyrate (P4HB) or co-polymers thereof, poly(tetramethylene ether) glycol (PTMEG)(also referred to as PTMO, polytetramethylene oxide), polybutylene terephthalate (PBT), and polyurethane-polyurea copolymers, referred to as spandex, elastane or Lycra™, and nylons comprising at least 2%, at least 3%, at least 5%, at least 10%, at least 15%, at least 20%, at least 25%, at least 30%, at least 35%, at least 40%, at least 50%, at least 60%, at least 70%, at least 80%, at least 90%, at least 95%, at least 98% or 100% bioderived 4-HB, 4-HBal, 4-HBCoA, BDO or putrescine or bioderived 4-HB, 4-HBal, 4-HBCoA, BDO or putrescine intermediate as disclosed herein. Additionally, in some aspects, the invention provides a biobased plastics, elastic fibers, polyurethanes, polyesters, including polyhydroxyalkanoates such as poly-4-hydroxybutyrate (P4HB) or co-polymers thereof, poly(tetramethylene ether) glycol (PTMEG)(also referred to as PTMO, polytetramethylene oxide), polybutylene terephthalate (PBT), and polyurethane-polyurea copolymers, referred to as spandex, elastane or Lycra™, and nylons wherein the 4-HB, 4-HBal, 4-HBCoA, BDO or putrescine or 4-HB, 4-HBal, 4-HBCoA, BDO or putrescine intermediate used in its production is a combination of bioderived and petroleum derived 4-HB, 4-HBal, 4-HBCoA, BDO or putrescine or 4-HB, 4-HBal, 4-HBCoA, BDO or putrescine intermediate. For example, a biobased plastics, elastic fibers, polyurethanes, polyesters, including polyhydroxyalkanoates such as poly-4-hydroxybutyrate (P4HB) or co-polymers thereof, poly(tetramethylene ether) glycol (PTMEG)(also referred to as PTMO, polytetramethylene oxide), polybutylene terephthalate (PBT), and polyurethane-polyurea copolymers, referred to as spandex, elastane or Lycra™, and nylons can be produced using 50% bioderived the 4-HB, 4-HBal, 4-HBCoA, BDO or putrescine and 50% petroleum derived 4-HB, 4-HBal, 4-HBCoA, BDO or putrescine or other desired ratios such as 60%/40%, 70%/30%, 80%/20%, 90%/10%, 95%/5%, 100%/0%, 40%/60%, 30%/70%, 20%/80%, 10%/90% of bioderived/petroleum derived precursors, so long as at least a portion of the product comprises a bioderived product produced by the microbial organisms disclosed herein. It is understood that methods for producing plastics, elastic fibers, polyurethanes, polyesters, including polyhydroxyalkanoates such as poly-4-hydroxybutyrate (P4HB) or co-polymers thereof, poly(tetramethylene ether) glycol (PTMEG)(also referred to as PTMO, polytetramethylene oxide), polybutylene terephthalate (PBT), and polyurethane-polyurea copolymers, referred to as spandex, elastane or Lycra™, and nylons using the bioderived 4-HB, 4-HBal, 4-HBCoA, BDO or putrescine or bioderived 4-HB, 4-HBal, 4-HBCoA, BDO or putrescine intermediate of the invention are well known in the art.

[0248] The invention additionally provides culture medium, which can be fermentation broth, comprising bioderived 4-hydroxybutyrate or 1,4-butanediol, or other products disclosed herein, for example, 4-HB, 4-HBal, 4-HBCoA, BDO or putrescine, wherein the bioderived product has a carbon-12, carbon-13 and carbon-14 isotope ratio that reflects an atmospheric carbon dioxide uptake source. Such culture medium can comprise bioderived products such as 4-HB, 4-HBal, 4-HBCoA, BDO or putrescine produced by a microbial organism of the invention as disclosed herein. In a particular embodiment, the culture medium can be separated from a non-naturally occurring microbial organism having a 4-HB, 4-HBal, 4-HBCoA, BDO or putrescine pathway, for example, a 4-hydroxybutyrate or 1,4-butanediol pathway. In another embodiment, the invention provides bioderived a 4-HB, 4-HBal, 4-HBCoA, BDO or putrescine, for example, 4-hydroxybutyrate or 1,4-butanediol, having a carbon-12, carbon-13 and carbon-14 isotope ratio that reflects an atmospheric carbon dioxide uptake source, for example, produced by a microbial organism of the invention. In a particular embodiment, the bioderived a 4-HB, 4-HBal, 4-HBCoA, BDO or putrescine, for example, 4-hydroxybutyrate or 1,4-butanediol, can have an Fm value of at least 80%, at least 85%, at least 90%, at least 95% or at least 98%. Such bioderived products of the invention can be produced by the microbial organisms or methods of the invention, as disclosed herein.

[0249] The invention further provides a composition comprising bioderived 4-HB, 4-HBal, 4-HBCoA, BDO or putrescine, for example, 4-hydroxybutyrate or 1,4-butanediol, and a compound other than the bioderived 4-HB, 4-HBal, 4-HBCoA, BDO or putrescine, for example, 4-hydroxybutyrate or 1,4-butanediol. The compound other than the bioderived product can be a cellular portion, for example, a trace amount of a cellular portion of, or can be fermentation broth or culture medium or a purified or partially purified fraction thereof produced in the presence of, a non-naturally occurring microbial organism of the invention having a 4-HB, 4-HBal, 4-HBCoA, BDO or putrescine, for example, for example, a 4-hydroxybutyrate or 1,4-butanediol pathway. The composition can comprise, for example, a reduced level of a byproduct when produced by an organism having reduced byproduct formation, as disclosed herein. The composition can comprise, for example, bioderived 4-HB, 4-HBal, 4-HBCoA, BDO or putrescine, for example, 4-hydroxybutyrate or 1,4-butanediol, or a cell lysate or culture supernatant of a microbial organism of the invention.

[0250] The invention additionally provides a biobased product comprising biobased 4-HB, 4-HBal, 4-HBCoA, BDO or putrescine, where the biobased product is a plastic, elastic fiber, polyurethane, polyester, polyhydroxyalkanoate, poly-4-hydroxybutyrate (P4HB), or a co-polymer thereof, poly(tetramethylene ether) glycol (PTMEG), polybutylene terephthalate (PBT), polyurethane-polyurea copolymer, or nylon. In one embodiment, the biobased product can comprise at least 5%, at least 10%, at least 20%, at least 30%, at least 40% or at least 50% bioderived 4-HB, 4-HBal, 4-HBCoA, BDO or putrescine, for example, 4-hydroxybutyrate or 1,4-butanediol. In another embodiment, a portion of the biobased product can comprise a portion of the bioderived 4-HB, 4-HBal, 4-HBCoA, BDO or putrescine, for example, 4-hydroxybutyrate or 1,4-butanediol, as a repeating unit, alone or in combination with other monomeric units to form a polymer. In another embodiment, the invention provides a molded product obtained by molding a biobased product such as a plastic, elastic fiber, polyurethane, polyester, polyhydroxyalkanoate, poly-4-hydroxybutyrate (P4HB), or a co-polymer thereof, poly(tetramethylene ether) glycol (PTMEG), polybutylene terephthalate (PBT), polyurethane-polyurea copolymer, or nylon, or other product as disclosed herein. The invention further provides a process for producing a biobased product by chemically reacting bioderived 4-HB, 4-HBal, 4-HBCoA, BDO or putrescine, for example, 4-hydroxybutyrate or 1,4-butanediol, with itself or another compound in a reaction that produces the biobased product. Such bioderived products of the invention can be produced by the microbial organisms or methods of the invention, as disclosed herein.

[0251] The culture conditions can include, for example, liquid culture procedures as well as fermentation and other large scale culture procedures. As described herein, particularly useful yields of the biosynthetic products of the invention can be obtained under anaerobic or substantially anaerobic culture conditions.

[0252] As described herein, one exemplary growth condition for achieving biosynthesis of 4-HB, 4-HBal, 4-HBCoA, BDO or putrescine includes anaerobic culture or fermentation conditions. In certain embodiments, the non-naturally occurring microbial organisms of the invention can be sustained, cultured or fermented under anaerobic or substantially anaerobic conditions. Briefly, anaerobic conditions refers to an environment devoid of oxygen. Substantially anaerobic conditions include, for example, a culture, batch fermentation or continuous fermentation such that the dissolved oxygen concentration in the medium remains between 0 and 10% of saturation. Substantially anaerobic conditions also includes growing or resting cells in liquid medium or on solid agar inside a sealed chamber maintained with an atmosphere of less than 1% oxygen. The percent of oxygen can be maintained by, for example, sparging the culture with an N₂/CO₂ mixture or other suitable non-oxygen gas or gases.

[0253] The invention also provides a non-naturally occurring microbial biocatalyst including a microbial organism having 4-hydroxybutanoic acid (4-HB) and 1,4-butanediol (BDO) biosynthetic pathways that include at least one exogenous nucleic acid encoding 4-hydroxybutanoate dehydrogenase, CoA-independent succinic semialdehyde dehydrogenase, succinyl-CoA synthetase, CoA-dependent succinic semialdehyde dehydrogenase, 4-hydroxybutyrate:CoA transferase, glutamate:succinic semialdehyde transaminase, glutamate decarboxylase, CoA-independent aldehyde dehydrogenase, CoA-dependent aldehyde dehydrogenase or alcohol dehydrogenase, wherein the exogenous nucleic acid is expressed in sufficient amounts to produce 1,4-butanediol (BDO). 4-Hydroxybutyrate:CoA transferase also is known as 4-hydroxybutyryl CoA:acetyl-CoA transferase. Additional 4-HB or BDO pathway enzymes are also disclosed herein (see Examples and FIGS. 8-13).

[0254] The invention further provides non-naturally occurring microbial biocatalyst including a microbial organism having 4-hydroxybutanoic acid (4-HB) and 1,4-butanediol (BDO) biosynthetic pathways, the pathways include at least one exogenous nucleic acid encoding 4-hydroxybutanoate dehydrogenase, succinyl-CoA synthetase, CoA-dependent succinic semialdehyde dehydrogenase, 4-hydroxybutyrate:CoA transferase, 4-butyrate kinase, phosphotransbutyrylase, α-ketoglutarate decarboxylase, aldehyde dehydrogenase, alcohol dehydrogenase or an aldehyde/alcohol dehydrogenase, wherein the exogenous nucleic acid is expressed in sufficient amounts to produce 1,4-butanediol (BDO).

[0255] Non-naturally occurring microbial organisms also can be generated which biosynthesize BDO. As with the 4-HB producing microbial organisms of the invention, the BDO producing microbial organisms also can produce intracellularly or secret the BDO into the culture medium. Following the teachings and guidance provided previously for the construction of microbial organisms that synthesize 4-HB, additional BDO pathways can be incorporated into the 4-HB producing microbial organisms to generate organisms that also synthesize BDO and other BDO family compounds. The chemical synthesis of BDO and its downstream products are known. The non-naturally occurring microbial organisms of the invention capable of BDO biosynthesis circumvent these chemical synthesis using 4-HB as an entry point as illustrated in FIG. 1. As described further below, the 4-HB producers also can be used to chemically convert 4-HB to GBL and then to BDO or THF, for example. Alternatively, the 4-HB producers can be further modified to include biosynthetic capabilities for conversion of 4-HB and/or GBL to BDO.

[0256] The additional BDO pathways to introduce into 4-HB producers include, for example, the exogenous expression in a host deficient background or the overexpression of one or more of the enzymes exemplified in FIG. 1 as steps 9-13. One such pathway includes, for example, the enzyme activies necessary to carryout the reactions shown as steps 9, 12 and 13 in FIG. 1, where the aldehyde and alcohol dehydrogenases can be separate enzymes or a multifunctional enzyme having both aldehyde and alcohol dehydrogenase activity Another such pathway includes, for example, the enzyme activities necessary to carry out the reactions shown as steps 10, 11, 12 and 13 in FIG. 1, also where the aldehyde and alcohol dehydrogenases can be separate enzymes or a multifunctional enzyme having both aldehyde and alcohol dehydrogenase activity. Accordingly, the additional BDO pathways to introduce into 4-HB producers include, for example, the exogenous expression in a host deficient background or the overexpression of one or more of a 4-hydroxybutyrate:CoA transferase, butyrate kinase, phosphotransbutyrylase, CoA-independent aldehyde dehydrogenase, CoA-dependent aldehyde dehydrogenase or an alcohol dehydrogenase. In the absence of endogenous acyl-CoA synthetase capable of modifying 4-HB, the non-naturally occurring BDO producing microbial organisms can further include an exogenous acyl-CoA synthetase selective for 4-HB, or the combination of multiple enzymes that have as a net reaction conversion of 4-HB into 4-HB-CoA. As exemplified further below in the Examples, butyrate kinase and phosphotransbutyrylase exhibit BDO pathway activity and catalyze the conversions illustrated in FIG. 1 with a 4-HB substrate. Therefore, these enzymes also can be referred to herein as 4-hydroxybutyrate kinase and phosphotranshydroxybutyrylase respectively.

[0257] Exemplary alcohol and aldehyde dehydrogenases that can be used for these in vivo conversions from 4-HB to BDO are listed below in Table 1.

TABLE 1
Alcohol and Aldehyde Dehydrogenases
for Conversion of 4-HB to BDO.
ALCOHOL DEHYDROGENASES

| | |
|---|---|
| ec: 1.1.1.1 | alcohol dehydrogenase |
| ec: 1.1.1.2 | alcohol dehydrogenase (NADP+) |
| ec: 1.1.1.4 | (R,R)-butanediol dehydrogenase |
| ec: 1.1.1.5 | acetoin dehydrogenase |
| ec: 1.1.1.6 | glycerol dehydrogenase |
| ec: 1.1.1.7 | propanediol-phosphate dehydrogenase |
| ec: 1.1.1.8 | glycerol-3-phosphate dehydrogenase (NAD+) |
| ec: 1.1.1.11 | D-arabinitol 4-dehydrogenase |
| ec: 1.1.1.12 | L-arabinitol 4-dehydrogenase |
| ec: 1.1.1.13 | L-arabinitol 2-dehydrogenase |
| ec: 1.1.1.14 | L-iditol 2-dehydrogenase |
| ec: 1.1.1.15 | D-iditol 2-dehydrogenase |
| ec: 1.1.1.16 | galactitol 2-dehydrogenase |
| ec: 1.1.1.17 | mannitol-1-phosphate 5-dehydrogenase |
| ec: 1.1.1.18 | inositol 2-dehydrogenase |
| ec: 1.1.1.21 | aldehyde reductase |
| ec: 1.1.1.23 | histidinol dehydrogenase |
| ec: 1.1.1.26 | glyoxylate reductase |
| ec: 1.1.1.27 | L-lactate dehydrogenase |
| ec: 1.1.1.28 | D-lactate dehydrogenase |
| ec: 1.1.1.29 | glycerate dehydrogenase |
| ec: 1.1.1.30 | 3-hydroxybutyrate dehydrogenase |
| ec: 1.1.1.31 | 3-hydroxyisobutyrate dehydrogenase |
| ec: 1.1.1.35 | 3-hydroxyacyl-CoA dehydrogenase |
| ec: 1.1.1.36 | acetoacetyl-CoA reductase |
| ec: 1.1.1.37 | malate dehydrogenase |
| ec: 1.1.1.38 | malate dehydrogenase (oxaloacetate-decarboxylating) |
| ec: 1.1.1.39 | malate dehydrogenase (decarboxylating) |
| ec: 1.1.1.40 | malate dehydrogenase (oxaloacetate-decarboxylating) |
| | (NADP+) |
| ec: 1.1.1.41 | isocitrate dehydrogenase (NAD+) |
| ec: 1.1.1.42 | isocitrate dehydrogenase (NADP+) |
| ec: 1.1.1.54 | allyl-alcohol dehydrogenase |
| ec: 1.1.1.55 | lactaldehyde reductase (NADPH) |
| ec: 1.1.1.56 | ribitol 2-dehydrogenase |
| ec: 1.1.1.59 | 3-hydroxypropionate dehydrogenase |
| ec: 1.1.1.60 | 2-hydroxy-3-oxopropionate reductase |
| ec: 1.1.1.61 | 4-hydroxybutyrate dehydrogenase |
| ec: 1.1.1.66 | omega-hydroxydecanoate dehydrogenase |
| ec: 1.1.1.67 | mannitol 2-dehydrogenase |
| ec: 1.1.1.71 | alcohol dehydrogenase [NAD(P)+] |
| ec: 1.1.1.72 | glycerol dehydrogenase (NADP+) |
| ec: 1.1.1.73 | octanol dehydrogenase |
| ec: 1.1.1.75 | (R)-aminopropanol dehydrogenase |
| ec: 1.1.1.76 | (S,S)-butanediol dehydrogenase |
| ec: 1.1.1.77 | lactaldehyde reductase |
| ec: 1.1.1.78 | methylglyoxal reductase (NADH-dependent) |
| ec: 1.1.1.79 | glyoxylate reductase (NADP+) |
| ec: 1.1.1.80 | isopropanol dehydrogenase (NADP+) |
| ec: 1.1.1.81 | hydroxypyruvate reductase |
| ec: 1.1.1.82 | malate dehydrogenase (NADP+) |
| ec: 1.1.1.83 | D-malate dehydrogenase (decarboxylating) |
| ec: 1.1.1.84 | dimethylmalate dehydrogenase |
| ec: 1.1.1.85 | 3-isopropylmalate dehydrogenase |
| ec: 1.1.1.86 | ketol-acid reductoisomerase |
| ec: 1.1.1.87 | homoisocitrate dehydrogenase |
| ec: 1.1.1.88 | hydroxymethylglutaryl-CoA reductase |
| ec: 1.1.1.90 | aryl-alcohol dehydrogenase |
| ec: 1.1.1.91 | aryl-alcohol dehydrogenase (NADP+) |
| ec: 1.1.1.92 | oxaloglycolate reductase (decarboxylating) |
| ec: 1.1.1.94 | glycerol-3-phosphate dehydrogenase [NAD(P)+] |
| ec: 1.1.1.95 | phosphoglycerate dehydrogenase |
| ec: 1.1.1.97 | 3-hydroxybenzyl-alcohol dehydrogenase |
| ec: 1.1.1.101 | acylglycerone-phosphate reductase |
| ec: 1.1.1.103 | L-threonine 3-dehydrogenase |
| ec: 1.1.1.104 | 4-oxoproline reductase |
| ec: 1.1.1.105 | retinol dehydrogenase |
| ec: 1.1.1.110 | indolelactate dehydrogenase |
| ec: 1.1.1.112 | indanol dehydrogenase |
| ec: 1.1.1.113 | L-xylose 1-dehydrogenase |
| ec: 1.1.1.129 | L-threonate 3-dehydrogenase |
| ec: 1.1.1.137 | ribitol-5-phosphate 2-dehydrogenase |
| ec: 1.1.1.138 | mannitol 2-dehydrogenase (NADP+) |
| ec: 1.1.1.140 | sorbitol-6-phosphate 2-dehydrogenase |
| ec: 1.1.1.142 | D-pinitol dehydrogenase |
| ec: 1.1.1.143 | sequoyitol dehydrogenase |
| ec: 1.1.1.144 | perillyl-alcohol dehydrogenase |
| ec: 1.1.1.156 | glycerol 2-dehydrogenase (NADP+) |
| ec: 1.1.1.157 | 3-hydroxybutyryl-CoA dehydrogenase |
| ec: 1.1.1.163 | cyclopentanol dehydrogenase |
| ec: 1.1.1.164 | hexadecanol dehydrogenase |
| ec: 1.1.1.165 | 2-alkyn-1-ol dehydrogenase |
| ec: 1.1.1.166 | hydroxycyclohexanecarboxylate dehydrogenase |
| ec: 1.1.1.167 | hydroxymalonate dehydrogenase |
| ec: 1.1.1.174 | cyclohexane-1,2-diol dehydrogenase |
| ec: 1.1.1.177 | glycerol-3-phosphate 1-dehydrogenase (NADP+) |
| ec: 1.1.1.178 | 3-hydroxy-2-methylbutyryl-CoA dehydrogenase |
| ec: 1.1.1.185 | L-glycol dehydrogenase |
| ec: 1.1.1.190 | indole-3-acetaldehyde reductase (NADH) |
| ec: 1.1.1.191 | indole-3-acetaldehyde reductase (NADPH) |
| ec: 1.1.1.192 | long-chain-alcohol dehydrogenase |
| ec: 1.1.1.194 | coniferyl-alcohol dehydrogenase |
| ec: 1.1.1.195 | cinnamyl-alcohol dehydrogenase |
| ec: 1.1.1.198 | (+)-borneol dehydrogenase |
| ec: 1.1.1.202 | 1,3-propanediol dehydrogenase |
| ec: 1.1.1.207 | (−)-menthol dehydrogenase |
| ec: 1.1.1.208 | (+)-neomenthol dehydrogenase |
| ec: 1.1.1.216 | farnesol dehydrogenase |
| ec: 1.1.1.217 | benzyl-2-methyl-hydroxybutyrate dehydrogenase |
| ec: 1.1.1.222 | (R)-4-hydroxyphenyllactate dehydrogenase |
| ec: 1.1.1.223 | isopiperitenol dehydrogenase |
| ec: 1.1.1.226 | 4-hydroxycyclohexanecarboxylate dehydrogenase |
| ec: 1.1.1.229 | diethyl 2-methyl-3-oxosuccinate reductase |
| ec: 1.1.1.237 | hydroxyphenylpyruvate reductase |
| ec: 1.1.1.244 | methanol dehydrogenase |
| ec: 1.1.1.245 | cyclohexanol dehydrogenase |
| ec: 1.1.1.250 | D-arabinitol 2-dehydrogenase |
| ec: 1.1.1.251 | galactitol 1-phosphate 5-dehydrogenase |
| ec: 1.1.1.255 | mannitol dehydrogenase |
| ec: 1.1.1.256 | fluoren-9-ol dehydrogenase |
| ec: 1.1.1.257 | 4-(hydroxymethyl)benzenesulfonate dehydrogenase |
| ec: 1.1.1.258 | 6-hydroxyhexanoate dehydrogenase |
| ec: 1.1.1.259 | 3-hydroxypimeloyl-CoA dehydrogenase |
| ec: 1.1.1.261 | glycerol-1-phosphate dehydrogenase [NAD(P)+] |
| ec: 1.1.1.265 | 3-methylbutanal reductase |
| ec: 1.1.1.283 | methylglyoxal reductase (NADPH-dependent) |
| ec: 1.1.1.286 | isocitrate-homoisocitrate dehydrogenase |
| ec: 1.1.1.287 | D-arabinitol dehydrogenase (NADP+) butanol |
| | dehydrogenase |

ALDEHYDE DEHYDROGENASES

| | |
|---|---|
| ec: 1.2.1.2 | formate dehydrogenase |
| ec: 1.2.1.3 | aldehyde dehydrogenase (NAD+) |
| ec: 1.2.1.4 | aldehyde dehydrogenase (NADP+) |
| ec: 1.2.1.5 | aldehyde dehydrogenase [NAD(P)+] |
| ec: 1.2.1.7 | benzaldehyde dehydrogenase (NADP+) |
| ec: 1.2.1.8 | betaine-aldehyde dehydrogenase |
| ec: 1.2.1.9 | glyceraldehyde-3-phosphate dehydrogenase |
| | (NADP+) |
| ec: 1.2.1.10 | acetaldehyde dehydrogenase (acetylating) |
| ec: 1.2.1.11 | aspartate-semialdehyde dehydrogenase |
| ec: 1.2.1.12 | glyceraldehyde-3-phosphate dehydrogenase |
| | (phosphorylating) |
| ec: 1.2.1.13 | glyceraldehyde-3-phosphate dehydrogenase |
| | (NADP+) (phosphorylating) |
| ec: 1.2.1.15 | malonate-semialdehyde dehydrogenase |
| ec: 1.2.1.16 | succinate-semialdehyde dehydrogenase [NAD(P)+] |
| ec: 1.2.1.17 | glyoxylate dehydrogenase (acylating) |
| ec: 1.2.1.18 | malonate-semialdehyde dehydrogenase (acetylating) |
| ec: 1.2.1.19 | aminobutyraldehyde dehydrogenase |
| ec: 1.2.1.20 | glutarate-semialdehyde dehydrogenase |
| ec: 1.2.1.21 | glycolaldehyde dehydrogenase |
| ec: 1.2.1.22 | lactaldehyde dehydrogenase |
| ec: 1.2.1.23 | 2-oxoaldehyde dehydrogenase (NAD+) |
| ec: 1.2.1.24 | succinate-semialdehyde dehydrogenase |
| ec: 1.2.1.25 | 2-oxoisovalerate dehydrogenase (acylating) |
| ec: 1.2.1.26 | 2,5-dioxovalerate dehydrogenase |
| ec: 1.2.1.27 | methylmalonate-semialdehyde dehydrogenase (acylating) |
| ec: 1.2.1.28 | benzaldehyde dehydrogenase (NAD+) |
| ec: 1.2.1.29 | aryl-aldehyde dehydrogenase |
| ec: 1.2.1.30 | aryl-aldehyde dehydrogenase (NADP+) |
| ec: 1.2.1.31 | L-aminoadipate-semialdehyde dehydrogenase |
| ec: 1.2.1.32 | aminomuconate-semialdehyde dehydrogenase |
| ec: 1.2.1.36 | retinal dehydrogenase |
| ec: 1.2.1.39 | phenylacetaldehyde dehydrogenase |
| ec: 1.2.1.41 | glutamate-5-semialdehyde dehydrogenase |
| ec: 1.2.1.42 | hexadecanal dehydrogenase (acylating) |
| ec: 1.2.1.43 | formate dehydrogenase (NADP+) |
| ec: 1.2.1.45 | 4-carboxy-2-hydroxymuconate-6-semialdehyde |
| | dehydrogenase |
| ec: 1.2.1.46 | formaldehyde dehydrogenase |
| ec: 1.2.1.47 | 4-trimethylammoniobutyraldehyde dehydrogenase |
| ec: 1.2.1.48 | long-chain-aldehyde dehydrogenase |
| ec: 1.2.1.49 | 2-oxoaldehyde dehydrogenase (NADP+) |
| ec: 1.2.1.51 | pyruvate dehydrogenase (NADP+) |
| ec: 1.2.1.52 | oxoglutarate dehydrogenase (NADP+) |
| ec: 1.2.1.53 | 4-hydroxyphenylacetaldehyde dehydrogenase |
| ec: 1.2.1.57 | butanal dehydrogenase |
| ec: 1.2.1.58 | phenylglyoxylate dehydrogenase (acylating) |
| ec: 1.2.1.59 | glyceraldehyde-3-phosphate dehydrogenase (NAD(P)+) |
| | (phosphorylating) |
| ec: 1.2.1.62 | 4-formylbenzenesulfonate dehydrogenase |
| ec: 1.2.1.63 | 6-oxohexanoate dehydrogenase |
| ec: 1.2.1.64 | 4-hydroxybenzaldehyde dehydrogenase |
| ec: 1.2.1.65 | salicylaldehyde dehydrogenase |
| ec: 1.2.1.66 | mycothiol-dependent formaldehyde dehydrogenase |
| ec: 1.2.1.67 | vanillin dehydrogenase |
| ec: 1.2.1.68 | coniferyl-aldehyde dehydrogenase |
| ec: 1.2.1.69 | fluoroacetaldehyde dehydrogenase |
| ec: 1.2.1.71 | succinylglutamate-semialdehyde dehydrogenase |

[0258] Other exemplary enzymes and pathways are disclosed herein (see Examples). Furthermore, it is understood that enzymes can be utilized for carry out reactions for which the substrate is not the natural substrate. While the activity for the non-natural substrate may be lower than the natural substrate, it is understood that such enzymes can be utilized, either as naturally occurring or modified using the directed evolution or adaptive evolution, as disclosed herein (see also Examples).

[0259] BDO production through any of the pathways disclosed herein are based, in part, on the identification of the appropriate enzymes for conversion of precursors to BDO. A number of specific enzymes for several of the reaction steps have been identified. For those transformations where enzymes specific to the reaction precursors have not been identified, enzyme candidates have been identified that are best suited for catalyzing the reaction steps. Enzymes have been shown to operate on a broad range of substrates, as discussed below. In addition, advances in the field of protein engineering also make it feasible to alter enzymes to act efficiently on substrates, even if not a natural substrate. Described below are several examples of broad-specificity enzymes from diverse classes suitable for a BDO pathway as well as methods that have been used for evolving enzymes to act on non-natural substrates.

[0260] A key class of enzymes in BDO pathways is the oxidoreductases that interconvert ketones or aldehydes to alcohols (1.1.1). Numerous exemplary enzymes in this class can operate on a wide range of substrates. An alcohol dehydrogenase (1.1.1.1) purified from the soil bacterium Brevibacterium sp KU 1309 (Hirano et al., J. Biosc. Bioeng. 100:318-322 (2005)) was shown to operate on a plethora of aliphatic as well as aromatic alcohols with high activities. Table 2 shows the activity of the enzyme and its Kₘ on different alcohols. The enzyme is reversible and has very high activity on several aldehydes also (Table 3).

TABLE 2
Relative activities of an alcohol dehydrogenase from
Brevibacterium sp KU to oxidize various alcohols.

| | Relative Activity | Kₘ |
|---|---|---|
| Substrate | (0%) | (mM) |
| 2-Phenylethanol | 100* | 0.025 |
| (S)-2-Phenylpropanol | 156 | 0.157 |
| (R)-2-Phenylpropanol | 63 | 0.020 |
| Bynzyl alcohol | 199 | 0.012 |
| 3-Phenylpropanol | 135 | 0.033 |
| Ethanol | 76 | |
| 1-Butanol | 111 | |
| 1-Octanol | 101 | |
| 1-Dodecanol | 68 | |
| 1-Phenylethanol | 46 | |
| 2-Propanol | 54 | |

*The activity of 2-phenylethanol, corresponding to 19.2 U/mg, was taken as 100%.

TABLE 3
Relative activities of an alcohol dehydrogenase from Brevibacterium
sp KU 1309 to reduce various carbonyl compounds.

| | Relative Activity | Kₘ |
|---|---|---|
| Substrate | (%) | (mM) |
| Phenylacetaldehyde | 100 | 0.261 |
| 2-Phenylpropionaldehyde | 188 | 0.864 |
| 1-Octylaldehyde | 87 | |
| Acetophenone | 0 | |

[0261] Lactate dehydrogenase (1.1.1.27) from Ralstonia eutropha is another enzyme that has been demonstrated to have high activities on several 2-oxoacids such as 2-oxobutyrate, 2-oxopentanoate and 2-oxoglutarate (a C5 compound analogous to 2-oxoadipate) (Steinbuchel and Schlegel, Eur J. Biochem. 130:329-334 (1983)). Column 2 in Table 4 demonstrates the activities of IdhA from R. eutropha (formerly A. eutrophus) on different substrates (Steinbuchel and Schlegel, supra, 1983).

TABLE 4
The in vitro activity of R. eutropha ldhA (Steinbuchel
and Schlegel, supra, 1983) on different substrates
and compared with that on pyruvate.

| | Activity (%) of | | |
|---|---|---|---|
| | L(+)-lactate | L(+)-lactate | D(−)-lactate |
| | dehydrogenase | dehydrogenase | dehydrogenase |
| | from | from | from |
| Substrate | A. eutrophus | rabbit muscle | L. leichmanii |
| Glyoxylate | 8.7 | 23.9 | 5.0 |
| Pyruvate | 100.0 | 100.0 | 100.0 |
| 2-Oxobutyrate | 107.0 | 18.6 | 1.1 |
| 2-Oxovalerate | 125.0 | 0.7 | 0.0 |
| 3-Methyl-2- | 28.5 | 0.0 | 0.0 |
| oxobutyrate | | | |
| 3-Methyl-2- | 5.3 | 0.0 | 0.0 |
| oxovalerate | | | |
| 4-Methyl-2- | 39.0 | 1.4 | 1.1 |
| oxopentanoate | | | |
| Oxaloacetate | 0.0 | 33.1 | 23.1 |
| 2-Oxoglutarate | 79.6 | 0.0 | 0.0 |
| 3-Fluoropyruvate | 33.6 | 74.3 | 40.0 |

[0262] Oxidoreductases that can convert 2-oxoacids to their acyl-CoA counterparts (1.2.1) have been shown to accept multiple substrates as well. For example, branched-chain 2-keto-acid dehydrogenase complex (BCKAD), also known as 2-oxoisovalerate dehydrogenase (1.2.1.25), participates in branched-chain amino acid degradation pathways, converting 2-keto acids derivatives of valine, leucine and isoleucine to their acyl-CoA derivatives and CO₂. In some organisms including Rattus norvegicus (Paxton et al., Biochem. J. 234:295-303 (1986)) and Saccharomyces cerevisiae (Sinclair et al., Biochem. Mol Biol. Int. 32:911-922 (1993), this complex has been shown to have a broad substrate range that includes linear oxo-acids such as 2-oxobutanoate and alpha-ketoglutarate, in addition to the branched-chain amino acid precursors.

[0263] Members of yet another class of enzymes, namely aminotransferases (2.6.1), have been reported to act on multiple substrates. Aspartate aminotransferase (aspAT) from Pyrococcus fursious has been identified, expressed in E. coli and the recombinant protein characterized to demonstrate that the enzyme has the highest activities towards aspartate and alpha-ketoglutarate but lower, yet significant activities towards alanine, glutamate and the aromatic amino acids (Ward et al., Archaea 133-141 (2002)). In another instance, an aminotransferase identified from Leishmania mexicana and expressed in E. coli (Venial et al., FEMS Microbiol. Lett. 229:217-222 (2003)) was reported to have a broad substrate specificity towards tyrosine (activity considered 100% on tyrosine), phenylalanine (90%), tryptophan (85%), aspartate (30%), leucine (25%) and methionine (25%), respectively (Vernal et al., Mol. Biochem. Parasitol 96:83-92 (1998)). Similar broad specificity has been reported for a tyrosine aminotransferase from Trypanosoma cruzi, even though both of these enzymes have a sequence homology of only 6%. The latter enzyme can accept leucine, methionine as well as tyrosine, phenylalanine, tryptophan and alanine as efficient amino donors (Nowicki et al., Biochim. Biophys. Acta 1546: 268-281 (2001)).

[0264] CoA transferases (2.8.3) have been demonstrated to have the ability to act on more than one substrate. Specifically, a CoA transferase was purified from Clostridium acetobutylicum and was reported to have the highest activities on acetate, propionate, and butyrate. It also had significant activities with valerate, isobutyrate, and crotonate (Wiesenborn et al., Appl. Environ. Microbiol. 55:323-329 (1989)). In another study, the E. coli enzyme acyl-CoA:acetate-CoA transferase, also known as acetate-CoA transferase (EC 2.8.3.8), has been shown to transfer the CoA moiety to acetate from a variety of branched and linear acyl-CoA substrates, including isobutyrate (Matthies and Schink, App. Environm. Microbiol. 58:1435-1439 (1992)), valerate (Vanderwinkel et al., Biochem. Biophys. Res Commun. 33:902-908 (1968b)) and butanoate (Vanderwinkel et al., Biochem. Biophys. Res Commun. 33:902-908(1968a).

[0265] Other enzyme classes additionally support broad substrate specificity for enzymes. Some isomerases (5.3.3) have also been proven to operate on multiple substrates. For example, L-rhamnose isomerase from Pseudomonas stutzeri catalyzes the isomerization between various aldoalses and ketoses (Yoshida et al., J. Mol. Biol. 365:1505-1516 (2007)). These include isomerization between L-rhamnose and L-rhamnulose, L-mannose and L-fructose, L-xylose and L-xylulose, D-ribose and D-ribulose, and D-allose and D-psicose.

[0266] In yet another class of enzymes, the phosphotransferases (2.7.1), the homoserine kinase (2.7.1.39) from E. coli that converts L-homoserine to L-homoserine phosphate, was found to phosphorylate numerous homoserine analogs. In these substrates, the carboxyl functional group at the R-position had been replaced by an ester or by a hydroxymethyl group (Huo and Viola, Biochemistry 35:16180-16185 (1996)). Table 5 demonstrates the broad substrate specificity of this kinase.

TABLE 5
The substrate specificity of homoserine kinase.

| Substrate | k_{cat} | % k_{cat} | Kₘ (mM) | k_{cat}/Kₘ |
|---|---|---|---|---|
| L-homoserine | 18.3 ± 0.1 | 100 | 0.14 ± 0.04 | 184 ± 17 |
| D-homoserine | 8.3 ± 1.1 | 32 | 31.8 ± 7.2 | 0.26 ± 0.03 |
| L-aspartate β- | 2.1 ± 0.1 | 8.2 | 0.28 ± 0.02 | 7.5 ± 0.3 |
| semialdehyde | | | | |
| L-2-amino-1,4- | 2.0 ± 0.5 | 7.9 | 11.6 ± 6.5 | 0.17 ± 0.06 |
| butanediol | | | | |
| L-2-amino-5- | 2.5 ± 0.4 | 9.9 | 1.1 ± 0.5 | 2.3 ± 0.3 |
| hydroxyvalerate | | | | |
| L-homoserine | 14.7 ± 2.6 | 80 | 4.9 ± 2.0 | 3.0 ± 0.6 |
| methyl ester | | | | |
| L-homoserine | 13.6 ± 0.8 | 74 | 1.9 ± 0.5 | 7.2 ± 1.7 |
| ethyl ester | | | | |
| L-homoserine | 13.6 ± 1.4 | 74 | 1.2 ± 0.5 | 11.3 ± 1.1 |
| isopropyl ester | | | | |
| L-homoserine | 14.0 ± 0.4 | 76 | 3.5 ± 0.4 | 4.0 ± 1.2 |
| n-propyl ester | | | | |
| L-homoserine | 16.4 ± 0.8 | 84 | 6.9 ± 1.1 | 2.4 ± 0.3 |
| isobutyl ester | | | | |
| L-homserine | 29.1 ± 1.2 | 160 | 5.8 ± 0.8 | 5.0 ± 0.5 |
| n-butyl ester | | | | |

[0267] Another class of enzymes useful in BDO pathways is the acid-thiol ligases (6.2.1). Like enzymes in other classes, certain enzymes in this class have been determined to have broad substrate specificity. For example, acyl CoA ligase from Pseudomonas putida has been demonstrated to work on several aliphatic substrates including acetic, propionic, butyric, valeric, hexanoic, heptanoic, and octanoic acids and on aromatic compounds such as phenylacetic and phenoxyacetic acids (Femandez-Valverde et al., Appl. Environ. Microbiol. 59:1149-1154 (1993)). A related enzyme, malonyl CoA synthetase (6.3.4.9) from Rhizobium trifolii could convert several diacids, namely, ethyl-, propyl-, allyl-, isopropyl-, dimethyl-, cyclopropyl-, cyclopropylmethylene-, cyclobutyl-, and benzyl-malonate into their corresponding monothioesters (Pohl et al., J. Am. Chem. Soc. 123:5822-5823 (2001)). Similarly, decarboxylases (4.1.1) have also been found with broad substrate ranges. Pyruvate decarboxylase (PDC), also termed keto-acid decarboxylase, is a key enzyme in alcoholic fermentation, catalyzing the decarboxylation of pyruvate to acetaldehyde. The enzyme isolated from Saccharomyces cerevisiae has a broad substrate range for aliphatic 2-keto acids including 2-ketobutyrate, 2-ketovalerate, and 2-phenylpyruvate (Li and Jordan, Biochemistry 38:10004-10012 (1999)). Similarly, benzoylformate decarboxylase has a broad substrate range and has been the target of enzyme engineering studies. The enzyme from Pseudomonas putida has been extensively studied and crystal structures of this enzyme are available (Polovnikova et al., Biochemistry 42:1820-1830 (2003); Hasson et al., Biochemistry 37:9918-9930 (1998)). Branched chain alpha-ketoacid decarboxylase (BCKA) has been shown to act on a variety of compounds varying in chain length from 3 to 6 carbons (Olur and Kaneda, J. Biol. Chem. 263:18386-18396 (1998); Smit et al., Appl. Environ. Microbiol. 71:303-311 (2005b)). The enzyme in Lactococcus lactis has been characterized on a variety of branched and linear substrates including 2-oxobutanoate, 2-oxohexanoate, 2-oxopentanoate, 3-methyl-2-oxobutanoate, 4-methyl-2-oxobutanoate and isocaproate (Smit et al., Appl. Environ. Microbiol. 71:303-311 (2005a).

[0268] Interestingly, enzymes known to have one dominant activity have also been reported to catalyze a very different function. For example, the cofactor-dependent phosphoglycerate mutase (5.4.2.1) from Bacillus stearothermophilus and Bacillus subtilis is known to function as a phosphatase as well (Rigden et al., Protein Sci. 10:1835-1846 (2001)). The enzyme from B. stearothermophilus is known to have activity on several substrates, including 3-phosphoglycerate, alpha-napthylphosphate, p-nitrophenylphosphate, AMP, fructose-6-phosphate, ribose-5-phosphate and CMP.

[0269] In contrast to these examples where the enzymes naturally have broad substrate specificities, numerous enzymes have been modified using directed evolution to broaden their specificity towards their non-natural substrates. Alternatively, the substrate preference of an enzyme has also been changed using directed evolution. Therefore, it is feasible to engineer a given enzyme for efficient function on a natural, for example, improved efficiency, or a non-natural substrate, for example, increased efficiency. For example, it has been reported that the enantioselectivity of a lipase from Pseudomonas aeruginosa was improved significantly (Reetz et al., Agnew Chem. Int. Ed Engl. 36:2830-2832 (1997)). This enzyme hydrolyzed p-nitrophenyl 2-methyldecanoate with only 2% enantiomeric excess (ee) in favor of the (S)-acid. However, after four successive rounds of error-prone mutagenesis and screening, a variant was produced that catalyzed the requisite reaction with 81% ee (Reetz et al., Agnew Chem. Int. Ed Engl. 36:2830-2832 (1997)).

[0270] Directed evolution methods have been used to modify an enzyme to function on an array of non-natural substrates. The substrate specificity of the lipase in P. aeruginosa was broadened by randomization of amino acid residues near the active site. This allowed for the acceptance of alpha-substituted carboxylic acid esters by this enzyme (Reetz et al., Agnew Chem. Int. Ed Engl. 44:4192-4196 (2005)). In another successful modification of an enzyme, DNA shuffling was employed to create an Escherichia coli aminotransferase that accepted β-branched substrates, which were poorly accepted by the wild-type enzyme (Yano et al., Proc. Nat. Acad. Sci. U.S.A. 95:5511-5515 (1998)). Specifically, at the end of four rounds of shuffling, the activity of aspartate aminotransferase for valine and 2-oxovaline increased by up to five orders of magnitude, while decreasing the activity towards the natural substrate, aspartate, by up to 30-fold. Recently, an algorithm was used to design a retro-aldolase that could be used to catalyze the carbon-carbon bond cleavage in a non-natural and non-biological substrate, 4-hydroxy-4-(6-methoxy-2-naphthyl)-2-butanone (Jiang et al., Science 319:1387-1391(2008)). These algorithms used different combinations of four different catalytic motifs to design new enzyme, and 20 of the selected designs for experimental characterization had four-fold improved rates over the uncatalyzed reaction (Jiang et al., Science 319:1387-1391 (2008)). Thus, not only are these engineering approaches capable of expanding the array of substrates on which an enzyme can act, but they allow the design and construction of very efficient enzymes. For example, a method of DNA shuffling (random chimeragenesis on transient templates or RACHITT) was reported to lead to an engineered monooxygenase that had an improved rate of desulfurization on complex substrates as well as 20-fold faster conversion of a non-natural substrate (Coco et al., Nat. Biotechnol. 19:354-359 (2001)). Similarly, the specific activity of a sluggish mutant triosephosphate isomerase enzyme was improved up to 19-fold from 1.3 fold (Hennes et al., Proc. Nat. Acad. Sci. U.S.A. 87:696-700 1990)). This enhancement in specific activity was accomplished by using random mutagenesis over the whole length of the protein and the improvement could be traced back to mutations in six amino acid residues.

[0271] The effectiveness of protein engineering approaches to alter the substrate specificity of an enzyme for a desired substrate has also been demonstrated in several studies. Isopropylmalate dehydrogenase from Thermus thermophilus was modified by changing residues close to the active site so that it could now act on malate and D-lactate as substrates (Fujita et al., Biosci. Biotechnol. Biochem. 65:2695-2700 (2001)). In this study as well as in others, it was pointed out that one or a few residues could be modified to alter the substrate specificity. For example, the dihydroflavonol 4-reductase for which a single amino acid was changed in the presumed substrate-binding region could preferentially reduce dihydrokaempferol (Johnson et al., Plant. J. 25:325-333 (2001)). The substrate specificity of a very specific isocitrate dehydrogenase from Escherichia coli was changed form isocitrate to isopropylmalate by changing one residue in the active site (Doyle et al., Biochemistry 40:4234-4241 (2001)). Similarly, the cofactor specificity of a NAD⁺-dependent 1,5-hydroxyprostaglandin dehydrogenase was altered to NADP⁺ by changing a few residues near the N-terminal end (Cho et al., Arch. Biochem. Biophys. 419:139-146 (2003)). Sequence analysis and molecular modeling analysis were used to identify the key residues for modification, which were further studied by site-directed mutagenesis.

[0272] Numerous examples exist spanning diverse classes of enzymes where the function of enzyme was changed to favor one non-natural substrate over the natural substrate of the enzyme. A fucosidase was evolved from a galactosidase in E. coli by DNA shuffling and screening (Zhang et al., Proc. Natl Acad. Sci. U.S.A. 94:4504-4509 (1997)). Similarly, aspartate aminotransferase from E. coli was converted into a tyrosine aminotransferase using homology modeling and site-directed mutagenesis (Onuffer and Kirsch, Protein Sci., 4:1750-1757 (1995)). Site-directed mutagenesis of two residues in the active site of benzoylformate decarboxylase from P. putida reportedly altered the affinity (Kₘ) towards natural and non-natural substrates (Siegert et al., Protein Eng Des Sel 18:345-357 (2005)). Cytochrome c peroxidase (CCP) from Saccharomyces cerevisiae was subjected to directed molecular evolution to generate mutants with increased activity against the classical peroxidase substrate guaiacol, thus changing the substrate specificity of CCP from the protein cytochrome c to a small organic molecule. After three rounds of DNA shuffling and screening, mutants were isolated which possessed a 300-fold increased activity against guaiacol and up to 1000-fold increased specificity for this substrate relative to that for the natural substrate (Iffland et al., Biochemistry 39:10790-10798 (2000)).

[0273] In some cases, enzymes with different substrate preferences than either of the parent enzymes have been obtained. For example, biphenyl-dioxygenase-mediated degradation of polychlorinated biphenyls was improved by shuffling genes from two bacteria, Pseudomonas pseudoalcaligens and Burkholderia cepacia (Kumamaru et al., Nat. Biotechnol. 16:663-666 (1998)). The resulting chimeric biphenyl oxygenases showed different substrate preferences than both the parental enzymes and enhanced the degradation activity towards related biphenyl compounds and single aromatic ring hydrocarbons such as toluene and benzene which were originally poor substrates for the enzyme.

[0274] In addition to changing enzyme specificity, it is also possible to enhance the activities on substrates for which the enzymes naturally have low activities. One study demonstrated that amino acid racemase from P. putida that had broad substrate specificity (on lysine, arginine, alanine, serine, methionine, cysteine, leucine and histidine among others) but low activity towards tryptophan could be improved significantly by random mutagenesis (Kino et al., Appl. Microbiol. Biotechnol. 73:1299-1305 (2007)). Similarly, the active site of the bovine BCKAD was engineered to favor alternate substrate acetyl-CoA (Meng and Chuang, Biochemistry 33:12879-12885 (1994)). An interesting aspect of these approaches is that even if random methods have been applied to generate these mutated enzymes with efficacious activities, the exact mutations or structural changes that confer the improvement in activity can be identified. For example, in the aforementioned study, the mutations that facilitated improved activity on tryptophan was traced back to two different positions.

[0275] Directed evolution has also been used to express proteins that are difficult to express. For example, by subjecting horseradish peroxidase to random mutagenesis and gene recombination, mutants were identified that had more than 14-fold higher activity than the wild type (Lin et al., Biotechnol. Prog. 15:467-471 (1999)).

[0276] Another example of directed evolution shows the extensive modifications to which an enzyme can be subjected to achieve a range of desired functions. The enzyme lactate dehydrogenase from Bacillus stearothermophilus was subjected to site-directed mutagenesis, and three amino acid substitutions were made at sites that were believed to determine the specificity towards different hydroxyacids (Clarke et al., Biochem. Biophys. Res. Commun. 148:15-23 (1987)). After these mutations, the specificity for oxaloacetate over pyruvate was increased to 500 in contrast to the wild type enzyme that had a catalytic specificity for pyruvate over oxaloacetate of 1000. This enzyme was further engineered using site-directed mutagenesis to have activity towards branched-chain substituted pyruvates (Wilks et al., Biochemistry 29:8587-8591 (1990)). Specifically, the enzyme had a 55-fold improvement in K_{cat} for alpha-ketoisocaproate. Three structural modifications were made in the same enzyme to change its substrate specificity from lactate to malate. The enzyme was highly active and specific towards malate (Wilks et al., Science 242:1541-1544 (1988)). The same enzyme from B. stearothermophilus was subsequently engineered to have high catalytic activity towards alpha-keto acids with positively charged side chains, such as those containing ammonium groups (Hogan et al., Biochemistry 34:4225-4230 (1995)). Mutants with acidic amino acids introduced at position 102 of the enzyme favored binding of such side chain ammonium groups. The results obtained proved that the mutants showed up to 25-fold improvements in k_{cat}/Kₘ values for omega-amino-alpha-keto acid substrates. Interestingly, this enzyme was also structurally modified to function as a phenyllactate dehydrogenase instead of a lactate dehydrogenase (Wilks et al., Biochemistry 31:7802-7806 1992). Restriction sites were introduced into the gene for the enzyme which allowed a region of the gene to be excised. This region coded for a mobile surface loop of the polypeptide (residues 98-110) which normally seals the active site from bulk solvent and is a major determinant of substrate specificity. The variable length and sequence loops were inserted so that hydroxyacid dehydrogenases with altered substrate specificities were generated. With one longer loop construction, activity with pyruvate was reduced one-million-fold but activity with phenylpyruvate was largely unaltered. A switch in specificity (k_{cat}/Kₘ) of 390,000-fold was achieved. The 1700:1 selectivity of this enzyme for phenylpyruvate over pyruvate is that required in a phenyllactate dehydrogenase. The studies described above indicate that various approaches of enzyme engineering can be used to obtain enzymes for the BDO pathways as disclosed herein.

[0277] As disclosed herein, biosynthetic pathways to 1,4-butanediol from a number of central metabolic intermediates are can be utilized, including acetyl-CoA, succinyl-CoA, alpha-ketoglutarate, glutamate, 4-aminobutyrate, and homoserine. Acetyl-CoA, succinyl-CoA and alpha-ketoglutarate are common intermediates of the tricarboxylic acid (TCA) cycle, a series of reactions that is present in its entirety in nearly all living cells that utilize oxygen for cellular respiration and is present in truncated forms in a number of anaerobic organisms. Glutamate is an amino acid that is derived from alpha-ketoglutarate via glutamate dehydrogenase or any of a number of transamination reactions (see FIG. 8B). 4-aminobutyrate can be formed by the decarboxylation of glutamate (see FIG. 8B) or from acetoacetyl-CoA via the pathway disclosed in FIG. 9C. Acetoacetyl-CoA is derived from the condensation of two acetyl-CoA molecules by way of the enzyme, acetyl-coenzyme A acetyltransferase, or equivalently, acetoacetyl-coenzyme A thiolase. Homoserine is an intermediate in threonine and methionine metabolism, formed from oxaloacetate via aspartate. The conversion of oxaloacetate to homoserine requires one NADH, two NADPH, and one ATP.

[0278] Pathways other than those exemplified above also can be employed to generate the biosynthesis of BDO in non-naturally occurring microbial organisms. In one embodiment, biosynthesis can be achieved using a L-homoserine to BDO pathway (see FIG. 13). This pathway has a molar yield of 0.90 mol/mol glucose, which appears restricted by the availability of reducing equivalents. A second pathway synthesizes BDO from acetoacetyl-CoA and is capable of achieving the maximum theoretical yield of 1.091 mol/mol glucose (see FIG. 9). Implementation of either pathway can be achieved by introduction of two exogenous enzymes into a host organism such as E. coli, and both pathways can additionally complement BDO production via succinyl-CoA. Pathway enzymes, thermodynamics, theoretical yields and overall feasibility are described further below.

[0279] A homoserine pathway also can be engineered to generate BDO-producing microbial organisms. Homoserine is an intermediate in threonine and methionine metabolism, formed from oxaloacetate via aspartate. The conversion of oxaloacetate to homoserine requires one NADH, two NADPH, and one ATP (FIG. 2). Once formed, homoserine feeds into biosynthetic pathways for both threonine and methionine. In most organisms, high levels of threonine or methionine feedback to repress the homoserine biosynthesis pathway (Caspi et al., Nucleic Acids Res. 34:D511-D516 (1990)).

[0280] The transformation of homoserine to 4-hydroxybutyrate (4-HB) can be accomplished in two enzymatic steps as described herein. The first step of this pathway is deamination of homoserine by a putative ammonia lyase. In step 2, the product alkene, 4-hydroxybut-2-enoate is reduced to 4-HB by a putative reductase at the cost of one NADH. 4-HB can then be converted to BDO.

[0281] Enzymes available for catalyzing the above transformations are disclosed herein. For example, the ammonia lyase in step 1 of the pathway closely resembles the chemistry of aspartate ammonia-lyase (aspartase). Aspartase is a widespread enzyme in microorganisms, and has been characterized extensively (Viola, R. E., Mol. Biol. 74:295-341 (2008)). The crystal structure of the E. coli aspartase has been solved (Shi et al., Biochemistry 36:9136-9144 (1997)), so it is therefore possible to directly engineer mutations in the enzyme's active site that would alter its substrate specificity to include homoserine. The oxidoreductase in step 2 has chemistry similar to several well-characterized enzymes including fumarate reductase in the E. coli TCA cycle. Since the thermodynamics of this reaction are highly favorable, an endogenous reductase with broad substrate specificity will likely be able to reduce 4-hydroxybut-2-enoate. The yield of this pathway under anaerobic conditions is 0.9 mol BDO per mol glucose.

[0282] The succinyl-CoA pathway was found to have a higher yield due to the fact that it is more energetically efficient. The conversion of one oxaloacetate molecule to BDO via the homoserine pathway will require the expenditure of 2 ATP equivalents. Because the conversion of glucose to two oxaloacetate molecules can generate a maximum of 3 ATP molecules assuming PEP carboxykinase to be reversible, the overall conversion of glucose to BDO via homoserine has a negative energetic yield. As expected, if it is assumed that energy can be generated via respiration, the maximum yield of the homoserine pathway increases to 1.05 mol/mol glucose which is 96% of the succinyl-CoA pathway yield. The succinyl-CoA pathway can channel some of the carbon flux through pyruvate dehydrogenase and the oxidative branch of the TCA cycle to generate both reducing equivalents and succinyl-CoA without an energetic expenditure. Thus, it does not encounter the same energetic difficulties as the homoserine pathway because not all of the flux is channeled through oxaloacetate to succinyl-CoA to BDO. Overall, the homoserine pathway demonstrates a high-yielding mute to BDO.

[0283] An acetoacetate pathway also can be engineered to generate BDO-producing microbial organisms. Acetoacetate can be formed from acetyl-CoA by enzymes involved in fatty acid metabolism, including acetyl-CoA acetyltransferase and acetoacetyl-CoA transferase. Biosynthetic mutes through acetoacetate are also particularly useful in microbial organisms that can metabolize single carbon compounds such as carbon monoxide, carbon dioxide or methanol to form acetyl-CoA.

[0284] A three step mute from acetoacetyl-CoA to 4-aminobutyrate (see FIG. 9C) can be used to synthesize BDO through acetoacetyl-CoA. 4-Aminobutyrate can be converted to succinic semialdehyde as shown in FIG. 8B. Succinic semialdehyde, which is one reduction step removed from succinyl-CoA or one decarboxylation step removed from α-ketoglutarate, can be converted to BDO following three reductions steps (FIG. 1). Briefly, step 1 of this pathway involves the conversion of acetoacetyl-CoA to acetoacetate by, for example, the E. coli acetoacetyl-CoA transferase encoded by the atoA and atoD genes (Hanai et al., Appl. Environ. Microbiol. 73: 7814-7818 (2007)). Step 2 of the acetoacetyl-CoA biopathway entails conversion of acetoacetate to 3-aminobutanoate by an θ-aminotransferase. The θ-amino acid:pyruvate aminotransferase (θ-APT) from Alcaligens denitrificans was overexpressed in E. coli and shown to have a high activity toward 3-aminobutanoate in vitro (Yun et al., Appl. Environ. Microbiol. 70:2529-2534 (2004)).

[0285] In step 2, a putative aminomutase shifts the amine group from the 3- to the 4-position of the carbon backbone. An aminomutase performing this function on 3-aminobutanoate has not been characterized, but an enzyme from Clostridium sticklandii has a very similar mechanism. The enzyme, D-lysine-5,6-aminomutase, is involved in lysine biosynthesis.

[0286] The synthetic mute to BDO from acetoacetyl-CoA passes through 4-aminobutanoate, a metabolite in E. coli that is normally formed from decarboxylation of glutamate. Once formed, 4-aminobutanoate can be converted to succinic semialdehyde by 4-aminobutanoate transaminase (2.6.1.19), an enzyme which has been biochemically characterized.

[0287] One consideration for selecting candidate enzymes in this pathway is the stereoselectivity of the enzymes involved in steps 2 and 3. The ω-ABT in Alcaligens denitrificans is specific to the L-stereoisomer of 3-aminobutanoate, while D-lysine-5,6-aminomutase likely requires the D-stereoisomer. If enzymes with complementary stereoselectivity are not initially found or engineered, a third enzyme can be added to the pathway with racemase activity that can convert L-3-aminobutanoate to D-3-aminobutanoate. While amino acid racemases are widespread, whether these enzymes can function on co-amino acids is not known.

[0288] The maximum theoretical molar yield of this pathway under anaerobic conditions is 1.091 mol/mol glucose. In order to generate flux from acetoacetyl-CoA to BDO it was necessary to assume that acetyl-CoA:acetoacetyl-CoA transferase is reversible. The function of this enzyme in E. coli is to metabolize short-chain fatty acids by first converting them into thioesters.

[0289] While the operation of acetyl-CoA:acetoacetyl-CoA transferase in the acetate-consuming direction has not been demonstrated experimentally in E. coli, studies on similar enzymes in other organisms support the assumption that this reaction is reversible. The enzyme butyryl-CoA:acetate:CoA transferase in gut microbes Roseburia sp. and F. prasnitzii operates in the acetate utilizing direction to produce butyrate (Duncan et al., Appl. Environ. Microbiol 68:5186-5190 (2002)). Another very similar enzyme, acetyl:succinate CoA-transferase in Trypanosoma brucei, also operates in the acetate utilizing direction. This reaction has a Δ_{IXn}G close to equilibrium, so high concentrations of acetate can likely drive the reaction in the direction of interest. At the maximum theoretical BDO production rate of 1.09 mol/mol glucose simulations predict that E. coli can generate 1.098 mol ATP per mol glucose with no fermentation byproducts. This ATP yield should be sufficient for cell growth, maintenance, and production. The acetoacetatyl-CoA biopathway is a high-yielding route to BDO from acetyl-CoA.

[0290] Therefore, in addition to any of the various modifications exemplified previously for establishing 4-HB biosynthesis in a selected host, the BDO producing microbial organisms can include any of the previous combinations and permutations of 4-HB pathway metabolic modifications as well as any combination of expression for CoA-independent aldehyde dehydrogenase, CoA-dependent aldehyde dehydrogenase or an alcohol dehydrogenase or other enzymes disclosed herein to generate biosynthetic pathways for GBL and/or BDO. Therefore, the BDO producers of the invention can have exogenous expression of, for example, one, two, three, four, five, six, seven, eight, nine, or up to all enzymes corresponding to any of the 4-HB pathway and/or any of the BDO pathway enzymes disclosed herein.

[0291] Design and construction of the genetically modified microbial organisms is carried out using methods well known in the art to achieve sufficient amounts of expression to produce BDO. In particular, the non-naturally occurring microbial organisms of the invention can achieve biosynthesis of BDO resulting in intracellular concentrations between about 0.1-200 mM or more, such as about 0.1-25 mM or more, as discussed above. For example, the intracellular concentration of BDO is between about 3-20 mM, particularly between about 5-15 mM and more particularly between about 8-12 mM, including about 10 mM or more. Intracellular concentrations between and above each of these exemplary ranges also can be achieved from the non-naturally occurring microbial organisms of the invention. As with the 4-HB producers, the BDO producers also can be sustained, cultured or fermented under anaerobic conditions.

[0292] The invention further provides a method for the production of 4-HB. The method includes culturing a non-naturally occurring microbial organism having a 4-hydroxybutanoic acid (4-HB) biosynthetic pathway comprising at least one exogenous nucleic acid encoding 4-hydroxybutanoate dehydrogenase, CoA-independent succinic semialdehyde dehydrogenase, succinyl-CoA synthetase, CoA-dependent succinic semialdehyde dehydrogenase, glutamate:succinic semialdehyde transaminase, α-ketoglutarate decarboxylase, or glutamate decarboxylase under substantially anaerobic conditions for a sufficient period of time to produce monomeric 4-hydroxybutanoic acid (4-HB). The method can additionally include chemical conversion of 4-HB to GBL and to BDO or THF, for example.

[0293] Additionally provided is a method for the production of 4-HB. The method includes culturing a non-naturally occurring microbial organism having a 4-hydroxybutanoic acid (4-HB) biosynthetic pathway including at least one exogenous nucleic acid encoding 4-hydroxybutanoate dehydrogenase, succinyl-CoA synthetase, CoA-dependent succinic semialdehyde dehydrogenase or α-ketoglutarate decarboxylase under substantially anaerobic conditions for a sufficient period of time to produce monomeric 4-hydroxybutanoic acid (4-HB). The 4-HB product can be secreted into the culture medium.

[0294] Further provided is a method for the production of BDO. The method includes culturing a non-naturally occurring microbial biocatalyst or microbial organism, comprising a microbial organism having 4-hydroxybutanoic acid (44-HB) and 1,4-butanediol (BDO) biosynthetic pathways, the pathways including at least one exogenous nucleic acid encoding 4-hydroxybutanoate dehydrogenase, succinyl-CoA synthetase, CoA-dependent succinic semialdehyde dehydrogenase, 4-hydroxybutyrate:CoA transferase, 4-hydroxybutyrate kinase, phosphotranshydroxybutyrylase, α-ketoglutarate decarboxylase, aldehyde dehydrogenase, alcohol dehydrogenase or an aldehyde/alcohol dehydrogenase for a sufficient period of time to produce 1,4-butanediol (BDO). The BDO product can be secreted into the culture medium.

[0295] Additionally provided are methods for producing BDO by culturing a non-naturally occurring microbial organism having a BDO pathway of the invention. The BDO pathway can comprise at least one exogenous nucleic acid encoding a BDO pathway enzyme expressed in a sufficient amount to produce BDO, under conditions and for a sufficient period of time to produce BDO, the BDO pathway comprising 4-aminobutyrate CoA transferase, 4-aminobutyryl-CoA hydrolase, 4-aminobutyrate-CoA ligase, 4-aminobutyryl-CoA oxidoreductase (deaminating), 4-aminobutyryl-CoA transaminase, or 4-hydroxybutyryl-CoA dehydrogenase (see Example VII; see corresponding Example and Table 17 in WO2013/184602).

[0296] Alternatively, the BDO pathway can compared at least one exogenous nucleic acid encoding a BDO pathway enzyme expressed in a sufficient amount to produce BDO, under conditions and for a sufficient period of time to produce BDO, the BDO pathway comprising 4-aminobutyrate CoA transferase, 4-aminobutyryl-CoA hydrolase, 4-aminobutyrate-CoA ligase, 4-aminobutyryl-CoA reductase (alcohol forming), 4-aminobutyryl-CoA reductase, 4-aminobutan-1-ol dehydrogenase, 4-aminobutan-1-ol oxidoreductase (deaminating) or 4-aminobutan-1-ol transaminase (see Example VII; see corresponding Example and Table 18 in WO2013/184602).

[0297] In addition, the invention provides a method for producing BDO, comprising culturing a non-naturally occurring microbial organism having a BDO pathway, the pathway comprising at least one exogenous nucleic acid encoding a BDO pathway enzyme expressed in a sufficient amount to produce BDO, under conditions and for a sufficient period of time to produce BDO, the BDO pathway comprising 4-aminobutyrate kinase, 4-aminobutyraldehyde dehydrogenase (phosphorylating), 4-aminobutan-1-ol dehydrogenase, 4-aminobutan-1-ol oxidoreductase (deaminating), 4-aminobutan-1-ol transaminase, [(4-aminobutanolyl)oxy]phosphonic acid oxidoreductase (deaminating), [(4-aminobutanolyl)oxy]phosphonic acid transaminase, 4-hydroxybutyryl-phosphate dehydrogenase, or 4-hydroxybutyraldehyde dehydrogenase (phosphorylating) (see Example VII; see corresponding Example and Table 19 in WO2013/184602).

[0298] The invention further provides a method for producing BDO, comprising culturing a non-naturally occurring microbial organism having a BDO pathway, the pathway comprising at least one exogenous nucleic acid encoding a BDO pathway enzyme expressed in a sufficient amount to produce BDO, under conditions and for a sufficient period of time to produce BDO, the BDO pathway comprising alpha-ketoglutarate 5-kinase, 2,5-dioxopentanoic semialdehyde dehydrogenase (phosphorylating), 2,5-dioxopentanoic acid reductase, alpha-ketoglutarate CoA transferase, alpha-ketoglutaryl-CoA hydrolase, alpha-ketoglutaryl-CoA ligase, alpha-ketoglutaryl-CoA reductase, 5-hydroxy-2-oxopentanoic acid dehydrogenase, alpha-ketoglutaryl-CoA reductase (alcohol forming), 5-hydroxy-2-oxopentanoic acid decarboxylase, or 5-hydroxy-2-oxopentanoic acid dehydrogenase (decarboxylation)(see Example VIII; see corresponding Example and Table 20 in WO2013/184602).

[0299] The invention additionally provides a method for producing BDO, comprising culturing a non-naturally occurring microbial organism having a BDO pathway, the pathway comprising at least one exogenous nucleic acid encoding a BDO pathway enzyme expressed in a sufficient amount to produce BDO, under conditions and for a sufficient period of time to produce BDO, the BDO pathway comprising glutamate CoA transferase, glutamyl-CoA hydrolase, glutamyl-CoA ligase, glutamate 5-kinase, glutamate-5-semialdehyde dehydrogenase (phosphorylating), glutamyl-CoA reductase, glutamate-5-semialdehyde reductase, glutamyl-CoA reductase (alcohol forming), 2-amino-5-hydroxypentanoic acid oxidoreductase (deaminating), 2-amino-5-hydroxypentanoic acid transaminase, 5-hydroxy-2-oxopentanoic acid decarboxylase, 5-hydroxy-2-oxopentanoic acid dehydrogenase (decarboxylation)(see Example IX; see corresponding Example and Table 21 in WO2013/184602).

[0300] The invention additionally includes a method for producing BDO, comprising culturing a non-naturally occurring microbial organism having a BDO pathway, the pathway comprising at least one exogenous nucleic acid encoding a BDO pathway enzyme expressed in a sufficient amount to produce BDO, under conditions and for a sufficient period of time to produce BDO, the BDO pathway comprising 3-hydroxybutyryl-CoA dehydrogenase, 3-hydroxybutyryl-CoA dehydratase, vinylacetyl-CoAΔ-isomerase, or 4-hydroxybutyryl-CoA dehydratase (see Example X; see corresponding Example and Table 22 in WO2013/184602).

[0301] Also provided is a method for producing BDO, comprising culturing a non-naturally occurring microbial organism having a BDO pathway, the pathway comprising at least one exogenous nucleic acid encoding a BDO pathway enzyme expressed in a sufficient amount to produce BDO, under conditions and for a sufficient period of time to produce BDO, the BDO pathway comprising homoserine deaminase, homoserine CoA transferase, homoserine-CoA hydrolase, homoserine-CoA ligase, homoserine-CoA deaminase, 4-hydroxybut-2-enoyl-CoA transferase, 4-hydroxybut-2-enoyl-CoA hydrolase, 4-hydroxybut-2-enoyl-CoA ligase, 4-hydroxybut-2-enoate reductase, 4-hydroxybutyryl-CoA transferase, 4-hydroxybutyryl-CoA hydrolase, 4-hydroxybutyryl-CoA ligase, or 4-hydroxybut-2-enoyl-CoA reductase (see Example XI; see corresponding Example and Table 23 in WO2013/184602).

[0302] The invention additionally provides a method for producing BDO, comprising culturing a non-naturally occurring microbial organism having a BDO pathway, the pathway comprising at least one exogenous nucleic acid encoding a BDO pathway enzyme expressed in a sufficient amount to produce BDO, under conditions and for a sufficient period of time to produce BDO, the BDO pathway comprising succinyl-CoA reductase (alcohol forming), 4-hydroxybutyryl-CoA hydrolase, 4-hydroxybutyryl-CoA ligase, 4-hydroxybutanal dehydrogenase (phosphorylating). Such a BDO pathway can further comprise succinyl-CoA reductase, 4-hydroxybutyrate dehydrogenase, 4-hydroxybutyryl-CoA transferase, 4-hydroxybutyrate kinase, phosphotrans-4-hydroxybutyrylase, 4-hydroxybutyryl-CoA reductase, 4-hydroxybutyryl-CoA reductase (alcohol forming), or 1,4-butanediol dehydrogenase.

[0303] Also provided is a method for producing BDO, comprising culturing a non-naturally occurring microbial organism having a BDO pathway, the pathway comprising at least one exogenous nucleic acid encoding a BDO pathway enzyme expressed in a sufficient amount to produce BDO, under conditions and for a sufficient period of time to produce BDO, the BDO pathway comprising glutamate dehydrogenase, 4-aminobutyrate oxidoreductase (deaminating), 4-aminobutyrate transaminase, glutamate decarboxylase, 4-hydroxybutyryl-CoA hydrolase, 4-hydroxybutyryl-CoA ligase, 4-hydroxybutanal dehydrogenase (phosphorylating).

[0304] The invention additionally provides methods of producing a desired product using the genetically modified organisms disclosed herein that allow improved production of a desired product such as BDO by increasing the product or decreasing undesirable byproducts. Thus, the invention provides a method for producing 1,4-butanediol (BDO), comprising culturing the non-naturally occurring microbial organisms disclosed herein under conditions and for a sufficient period of time to produce BDO. In one embodiment, the invention provides a method of producing BDO using a non-naturally occurring microbial organism, comprising a microbial organism having a 1,4-butanediol (BDO) pathway comprising at least one exogenous nucleic acid encoding a BDO pathway enzyme expressed in a sufficient amount to produce BDO. In one embodiment, the microbial organism is genetically modified to express exogenous succinyl-CoA synthetase (see Example XII). For example, the succinyl-CoA synthetase can be encoded by an Escherichia coli sucCD genes.

[0305] In another embodiment, the microbial organism is genetically modified to express exogenous alpha-ketoglutarate decarboxylase (see Example XIII). For example, the alpha-ketoglutarate decarboxylase can be encoded by the Mycobacterium bovis sucA gene. In still another embodiment, the microbial organism is genetically modified to express exogenous succinate semialdehyde dehydrogenase and 4-hydroxybutyrate dehydrogenase and optionally 4-hydroxybutyryl-CoA/acetyl-CoA transferase (see Example XIII). For example, the succinate semialdehyde dehydrogenase (CoA-dependent), 4-hydroxybutyrate dehydrogenase and 4-hydroxybutyryl-CoA/acetyl-CoA transferase can be encoded by Porphyromonas gingivalis W83 genes. In an additional embodiment, the microbial organism is genetically modified to express exogenous butyrate kinase and phosphotransbutyrylase (see Example XIII). For example, the butyrate kinase and phosphotransbutyrylase can be encoded by Clostridium acetobutilicum buk1 and ptb genes.

[0306] In yet another embodiment, the microbial organism is genetically modified to express exogenous 4-hydroxybutyryl-CoA reductase (see Example XIII). For example, the 4-hydroxybutyryl-CoA reductase can be encoded by Clostridium beijerinckii ald gene. Additionally, in an embodiment of the invention, the microbial organism is genetically modified to express exogenous 4-hydroxybutanal reductase (see Example XIII). For example, the 4-hydroxybutanal reductase can be encoded by Geobacillus thermoglucosidasius adh1 gene. In another embodiment, the microbial organism is genetically modified to express exogenous pyruvate dehydrogenase subunits (see Example XIV). For example, the exogenous pyruvate dehydrogenase can be NADH insensitive. The pyruvate dehydrogenase subunit can be encoded by the Klebsiella pneumonia lpdA gene. In a particular embodiment, the pyruvate dehydrogenase subunit genes of the microbial organism can be under the control of a pyruvate formate lyase promoter.

[0307] In still another embodiment, the microbial organism is genetically modified to disrupt a gene encoding an aerobic respiratory control regulatory system (see Example XV). For example, the disruption can be of the arcA gene. Such an organism can further comprise disruption of a gene encoding malate dehydrogenase. In a further embodiment, the microbial organism is genetically modified to express an exogenous NADH insensitive citrate synthase (see Example XV). For example, the NADH insensitive citrate synthase can be encoded by gltA, such as an R163L mutant of gltA. In still another embodiment, the microbial organism is genetically modified to express exogenous phosphoenolpyruvate carboxykinase (see Example XVI). For example, the phosphoenolpyruvate carboxykinase can be encoded by an Haemophilus influenza phosphoenolpyruvate carboxykinase gene. It is understood that strains exemplified herein for improved production of BDO can similarly be used, with appropriate modifications, to produce other desired products, for example, 4-hydroxybutyrate or other desired products disclosed herein.

[0308] The invention additionally provides a method for producing 4-hydroxybutanal by culturing a non-naturally occurring microbial organism, comprising a 4-hydroxybutanal pathway comprising at least one exogenous nucleic acid encoding a 4-hydroxybutanal pathway enzyme expressed in a sufficient amount to produce 4-hydroxybutanal, the 4-hydroxybutanal pathway comprising succinyl-CoA reductase (aldehyde forming); 4-hydroxybutyrate dehydrogenase; and 4-hydroxybutyrate reductase (see FIG. 58, steps A-C-D). The invention also provides a method for producing 4-hydroxybutanal by culturing a non-naturally occurring microbial organism, comprising a 4-hydroxybutanal pathway comprising at least one exogenous nucleic acid encoding a 4-hydroxybutanal pathway enzyme expressed in a sufficient amount to produce 4-hydroxybutanal, the 4-hydroxybutanal pathway comprising alpha-ketoglutarate decarboxylase; 4-hydroxybutyrate dehydrogenase; and 4-hydroxybutyrate reductase (FIG. 58, steps B-C-D).

[0309] The invention further provides a method for producing 4-hydroxybutanal by culturing a non-naturally occurring microbial organism, comprising a 4-hydroxybutanal pathway comprising at least one exogenous nucleic acid encoding a 4-hydroxybutanal pathway enzyme expressed in a sufficient amount to produce 4-hydroxybutanal, the 4-hydroxybutanal pathway comprising succinate reductase; 4-hydroxybutyrate dehydrogenase, and 4-hydroxybutyrate reductase (see FIG. 62, steps F-C-D). In yet another embodiment, the invention provides a method for producing 4-hydroxybutanal by culturing a non-naturally occurring microbial organism, comprising a 4-hydroxybutanal pathway comprising at least one exogenous nucleic acid encoding a 4-hydroxybutanal pathway enzyme expressed in a sufficient amount to produce 4-hydroxybutanal, the 4-hydroxybutanal pathway comprising alpha-ketoglutarate decarboxylase, or glutamate dehydrogenase or glutamate transaminase and glutamate decarboxylase and 4-aminobutyrate dehydrogenase or 4-aminobutyrate transaminase; 4-hydroxybutyrate dehydrogenase; and 4-hydroxybutyrate reductase (see FIG. 62, steps B or ((J or K)-L-(M or N))-C-D).

[0310] The invention also provides a method for producing 4-hydroxybutanal by culturing a non-naturally occurring microbial organism, comprising a 4-hydroxybutanal pathway comprising at least one exogenous nucleic acid encoding a 4-hydroxybutanal pathway enzyme expressed in a sufficient amount to produce 4-hydroxybutanal, the 4-hydroxybutanal pathway comprising alpha-ketoglutarate reductase; 5-hydroxy-2-oxopentanoate dehydrogenase; and 5-hydroxy-2-oxopentanoate decarboxylase (see FIG. 62, steps X-Y-Z). The invention further provides a method for producing 4-hydroxybutyryl-CoA by culturing a non-naturally occurring microbial organism, comprising a 4-hydroxybutyryl-CoA pathway comprising at least one exogenous nucleic acid encoding a 4-hydroxybutyryl-CoA pathway enzyme expressed in a sufficient amount to produce 4-hydroxybutyryl-CoA, the 4-hydroxybutyryl-CoA pathway comprising alpha-ketoglutarate reductase; 5-hydroxy-2-oxopentanoate dehydrogenase; and 5-hydroxy-2-oxopentanoate dehydrogenase (decarboxylation) (see FIG. 62, steps X-Y-AA).

[0311] The invention additionally provides a method for producing putrescine by culturing a non-naturally occurring microbial organism, comprising a putrescine pathway comprising at least one exogenous nucleic acid encoding a putrescine pathway enzyme expressed in a sufficient amount to produce putrescine, the putrescine pathway comprising succinate reductase; 4-aminobutyrate dehydrogenase or 4-aminobutyrate transaminase; 4-aminobutyrate reductase; and putrescine dehydrogenase or putrescine transaminase (see FIG. 63, steps F-M/N-C-D/E). In still another embodiment, the invention provides a method for producing putrescine by culturing a non-naturally occurring microbial organism, comprising a putrescine pathway comprising at least one exogenous nucleic acid encoding a putrescine pathway enzyme expressed in a sufficient amount to produce putrescine, the putrescine pathway comprising alpha-ketoglutarate decarboxylase; 4-aminobutyrate dehydrogenase or 4-aminobutyrate transaminase; 4-aminobutyrate reductase; and putrescine dehydrogenase or putrescine transaminase (see FIG. 63, steps B-M/N-C-D/E). The invention additionally provides a method for producing putrescine by culturing a non-naturally occurring microbial organism, comprising a putrescine pathway comprising at least one exogenous nucleic acid encoding a putrescine pathway enzyme expressed in a sufficient amount to produce putrescine, the putrescine pathway comprising glutamate dehydrogenase or glutamate transaminase; glutamate decarboxylase; 4-aminobutyrate reductase; and putrescine dehydrogenase or putrescine transaminase (see FIG. 63, steps J/K-L-C-D/E).

[0312] The invention provides in another embodiment a method for producing putrescine by culturing a non-naturally occurring microbial organism, comprising a putrescine pathway comprising at least one exogenous nucleic acid encoding a putrescine pathway enzyme expressed in a sufficient amount to produce putrescine, the putrescine pathway comprising alpha-ketoglutarate reductase; 5-amino-2-oxopentanoate dehydrogenase or 5-amino-2-oxopentanoate transaminase; 5-amino-2-oxopentanoate decarboxylase; and putrescine dehydrogenase or putrescine transaminase (see FIG. 63, steps O-P/Q-R-D/E). Also provided is a method for producing putrescine by culturing a non-naturally occurring microbial organism, comprising a putrescine pathway comprising at least one exogenous nucleic acid encoding a putrescine pathway enzyme expressed in a sufficient amount to produce putrescine, the putrescine pathway comprising alpha-ketoglutarate reductase; 5-amino-2-oxopentanoate dehydrogenase or 5-amino-2-oxopentanoate transaminase; omithine dehydrogenase or omithine transaminase; and omithine decarboxylase (see FIG. 63, steps O-P/Q-S/T-U). It is understood that a microbial organism comprising any of the pathways disclosed herein can be used to produce a a desired product or intermediate, including 4-HB, 4-HBal, BDO or putrescine.

[0313] It is understood that, in methods of the invention, any of the one or more exogenous nucleic acids can be introduced into a microbial organism to produce a non-naturally occurring microbial organism of the invention. The nucleic acids can be introduced so as to confer, for example, a 4-HB, BDO, THF or GBL biosynthetic pathway onto the microbial organism. Alternatively, encoding nucleic acids can be introduced to produce an intermediate microbial organism having the biosynthetic capability to catalyze some of the required reactions to confer 4-HB, BDO, THF or GBL biosynthetic capability. For example, a non-naturally occurring microbial organism having a 4-HB biosynthetic pathway can comprise at least two exogenous nucleic acids encoding desired enzymes, such as the combination of 4-hydroxybutanoate dehydrogenase and α-ketoglutarate decarboxylase; 4-hydroxybutanoate dehydrogenase and CoA-independent succinic semialdehyde dehydrogenase; 4-hydroxybutanoate dehydrogenase and CoA-dependent succinic semialdehyde dehydrogenase; CoA-dependent succinic semialdehyde dehydrogenase and succinyl-CoA synthetase; succinyl-CoA synthetase and glutamate decarboxylase, and the like. Thus, it is understood that any combination of two or more enzymes of a biosynthetic pathway can be included in a non-naturally occurring microbial organism of the invention. Similarly, it is understood that any combination of three or more enzymes of a biosynthetic pathway can be included in a non-naturally occurring microbial organism of the invention, for example, 4-hydroxybutanoate dehydrogenase, α-ketoglutarate decarboxylase and CoA-dependent succinic semialdehyde dehydrogenase; CoA-independent succinic semialdehyde dehydrogenase and succinyl-CoA synthetase; 4-hydroxybutanoate dehydrogenase, CoA-dependent succinic semialdehyde dehydrogenase and glutamate:succinic semialdehyde transaminase, and so forth, as desired, so long as the combination of enzymes of the desired biosynthetic pathway results in production of the corresponding desired product.

[0314] Similarly, for example, with respect to any one or more exogenous nucleic acids introduced to confer BDO production, a non-naturally occurring microbial organism having a BDO biosynthetic pathway can comprise at least two exogenous nucleic acids encoding desired enzymes, such as the combination of 4-hydroxybutanoate dehydrogenase and α-ketoglutarate decarboxylase; 4-hydroxybutanoate dehydrogenase and 4-hydroxybutyryl CoA:acetyl-CoA transferase; 4-hydroxybutanoate dehydrogenase and butyrate kinase; 4-hydroxybutanoate dehydrogenase and phosphotransbutyrylase; 4-hydroxybutyryl CoA:acetyl-CoA transferase and aldehyde dehydrogenase; 4-hydroxybutyryl CoA:acetyl-CoA transferase and alcohol dehydrogenase; 4-hydroxybutyryl CoA:acetyl-CoA transferase and an aldehyde/alcohol dehydrogenase, 4-aminobutyrate-CoA transferase and 4-aminobutyryl-CoA transaminase; 4-aminobutyrate kinase and 4-aminobutan-1-ol oxidoreductase (deaminating), and the like. Thus, it is understood that any combination of two or more enzymes of a biosynthetic pathway can be included in a non-naturally occurring microbial organism of the invention. Similarly, it is understood that any combination of three or more enzymes of a biosynthetic pathway can be included in a non-naturally occurring microbial organism of the invention, for example, 4-hydroxybutanoate dehydrogenase, α-ketoglutarate decarboxylase and 4-hydroxybutyryl CoA:acetyl-CoA transferase; 4-hydroxybutanoate dehydrogenase, butyrate kinase and phosphotransbutyrylase; 4-hydroxybutanoate dehydrogenase, 4-hydroxybutyryl CoA:acetyl-CoA transferase and aldehyde dehydrogenase; 4-hydroxybutyryl CoA:acetyl-CoA transferase, aldehyde dehydrogenase and alcohol dehydrogenase; butyrate kinase, phosphotransbutyrylase and an aldehyde/alcohol dehydrogenase; 4-aminobutyryl-CoA hydrolase, 4-aminobutyryl-CoA reductase and 4-amino butan-1-ol transaminase; 3-hydroxybutyryl-CoA dehydrogenase, 3-hydroxybutyryl-CoA dehydratase and 4-hydroxybutyryl-CoA dehydratase, and the like. Similarly, any combination of four, five or more enzymes of a biosynthetic pathway as disclosed herein can be included in a non-naturally occurring microbial organism of the invention, as desired, so long as the combination of enzymes of the desired biosynthetic pathway results in production of the corresponding desired product.

[0315] Any of the non-naturally occurring microbial organisms described herein can be cultured to produce and/or secrete the biosynthetic products of the invention. For example, the 4-HB producers can be cultured for the biosynthetic production of 4-HB. The 4-HB can be isolated or be treated as described below to generate GBL, THF and/or BDO. Similarly, the BDO producers can be cultured for the biosynthetic production of BDO. The BDO can be isolated or subjected to further treatments for the chemical synthesis of BDO family compounds, as disclosed herein. Thus, the invention provides a method of producing a desired product such as 4-HB, 4-HBal, 4-HBCoA, BDO or putrescine, for example, 4-HB or BDO using a microbial organism of the invention. Optionally, a purification or isolation step can be applied, for example, distillation, to purify the product such as 4-HB, 4-HBal, 4-HBCoA, BDO or putrescine, for example, 4-hydroxybutyrate or 1,4-butanediol. Thus, the invention also provides a method for producing isolated or purified product such as 4-HB, 4-HBal, 4-HBCoA, BDO or putrescine, for example, 4-hydroxybutyrate or 1,4-butanediol, by culturing the non-naturally occurring microbial organism of the invention under conditions and for a sufficient period of time to produce the product such as 4-HB, 4-HBal, 4-HBCoA, BDO or putrescine, for example, 4-hydroxybutyrate or 1,4-butanediol, and isolating or purifying the product. The isolating or purifying can comprise a step such as distillation.

[0316] The growth medium can include, for example, any carbohydrate source which can supply a source of carbon to the non-naturally occurring microorganism. Such sources include, for example, sugars such as glucose, sucrose, xylose, arabinose, galactose, mannose, fructose and starch; or glycerol, and it is understood that a carbon source can be used alone as the sole source of carbon or in combination with other carbon sources described herein or known in the art. Other sources of carbohydrate include, for example, renewable feedstocks and biomass. Exemplary types of biomasses that can be used as feedstocks in the methods of the invention include cellulosic biomass, hemicellulosic biomass and lignin feedstocks or portions of feedstocks. Such biomass feedstocks contain, for example, carbohydrate substrates useful as carbon sources such as glucose, sucrose, xylose, arabinose, galactose, mannose, fructose and starch. Given the teachings and guidance provided herein, those skilled in the art will understand that renewable feedstocks and biomass other than those exemplified above also can be used for culturing the microbial organisms of the invention for the production of 4-HB, 4-HBal, 4-HBCoA, BDO or putrescine and other compounds of the invention.

[0317] Accordingly, given the teachings and guidance provided herein, those skilled in the art will understand that a non-naturally occurring microbial organism can be produced that secretes the biosynthesized compounds of the invention when grown on a carbon source such as a carbohydrate. Such compounds include, for example, 4-HB, 4-HBal, 4-HBCoA, BDO or putrescine and any of the intermediates metabolites in the 4-HB, 4-HBal, 4-HBCoA, BDO or putrescine pathways and/or the combined 4-HB, 4-HBal, 4-HBCoA, BDO or putrescine pathways. All that is required is to engineer in one or more of the enzyme activities shown in FIG. 1 to achieve biosynthesis of the desired compound or intermediate including, for example, inclusion of some or all of the 4-HB, 4-HBal, 4-HBCoA, BDO or putrescine biosynthetic pathways. Accordingly, the invention provides a non-naturally occurring microbial organism that secretes 4-HB when grown on a carbohydrate, secretes BDO when grown on a carbohydrate and/or secretes any of the intermediate metabolites shown in FIGS. 1, 8-13, 58, 62, 63, 69 and 70 when grown on a carbohydrate. A BDO producing microbial organisms of the invention can initiate synthesis from, for example, succinate, succinyl-CoA, α-ketoglutarate, succinic semialdehyde, 4-HB, 4-hydroxybutyrylphosphate, 4-hydroxybutyryl-CoA (4-HB-CoA) and/or 4-hydroxybutyraldehyde.

[0318] In some embodiments, culture conditions include anaerobic or substantially anaerobic growth or maintenance conditions. Exemplary anaerobic conditions have been described previously and are well known in the art. Exemplary anaerobic conditions for fermentation processes are described below in the Examples. Any of these conditions can be employed with the non-naturally occurring microbial organisms as well as other anaerobic conditions well known in the art. Under such anaerobic conditions, the 4-HB, 4-HBal, 4-HBCoA, BDO or putrescine producers can synthesize monomeric 4-HB, 4-HBal, 4-HBCoA, BDO or putrescine, respectively, at intracellular concentrations of 5-10 mM or more as well as all other concentrations exemplified previously.

[0319] A number of downstream compounds also can be generated for the 4-HB, 4-HBal, 4-HBCoA, BDO or putrescine producing non-naturally occurring microbial organisms of the invention. With respect to the 4-HB producing microbial organisms of the invention, monomeric 4-HB and GBL exist in equilibrium in the culture medium. The conversion of 4-HB to GBL can be efficiently accomplished by, for example, culturing the microbial organisms in acid pH medium. A pH less than or equal to 7.5, in particular at or below pH 5.5, spontaneously converts 4-HB to GBL.

[0320] The resultant GBL can be separated from 4-HB and other components in the culture using a variety of methods well known in the art. Such separation methods include, for example, the extraction procedures exemplified in the Examples as well as methods which include continuous liquid-liquid extraction, pervaporation, membrane filtration, membrane separation, reverse osmosis, electrodialysis, distillation, crystallization, centrifugation, extractive filtration, ion exchange chromatography, size exclusion chromatography, adsorption chromatography, and ultrafiltration. All of the above methods are well known in the art. Separated GBL can be further purified by, for example, distillation.

[0321] Another down stream compound that can be produced from the 4-HB producing non-naturally occurring microbial organisms of the invention includes, for example, BDO. This compound can be synthesized by, for example, chemical hydrogenation of GBL. Chemical hydrogenation reactions are well known in the art. One exemplary procedure includes the chemical reduction of 4-HB and/or GBL or a mixture of these two components deriving from the culture using a heterogeneous or homogeneous hydrogenation catalyst together with hydrogen, or a hydride-based reducing agent used stoichiometrically or catalytically, to produce 1,4-butanediol.

[0322] Other procedures well known in the art are equally applicable for the above chemical reaction and include, for example, WO No. 82/03854 (Bradley, et al.), which describes the hydrogenolysis of gamma-butyrolactone in the vapor phase over a copper oxide and zinc oxide catalyst. British Pat. No. 1,230,276, which describes the hydrogenation of gamma-butyrolactone using a copper oxide-chromium oxide catalyst. The hydrogenation is carried out in the liquid phase. Batch reactions also are exemplified having high total reactor pressures. Reactant and product partial pressures in the reactors are well above the respective dew points. British Pat. No. 1,314,126, which describes the hydrogenation of gamma-butyrolactone in the liquid phase over a nickel-cobalt-thorium oxide catalyst. Batch reactions are exemplified as having high total pressures and component partial pressures well above respective component dew points. British Pat. No. 1,344,557, which describes the hydrogenation of gamma-butyrolactone in the liquid phase over a copper oxide-chromium oxide catalyst. A vapor phase or vapor-containing mixed phase is indicated as suitable in some instances. A continuous flow tubular reactor is exemplified using high total reactor pressures. British Pat. No. 1,512,751, which describes the hydrogenation of gamma-butyrolactone to 1,4-butanediol in the liquid phase over a copper oxide-chromium oxide catalyst. Batch reactions are exemplified with high total reactor pressures and, where determinable, reactant and product partial pressures well above the respective dew points. U.S. Pat. No. 4,301,077, which describes the hydrogenation to 1,4-butanediol of gamma-butyrolactone over a Ru—Ni—Co—Zn catalyst. The reaction can be conducted in the liquid or gas phase or in a mixed liquid-gas phase. Exemplified are continuous flow liquid phase reactions at high total reactor pressures and relatively low reactor productivities. U.S. Pat. No. 4,048,196, which describes the production of 1,4-butanediol by the liquid phase hydrogenation of gamma-butyrolactone over a copper oxide-zinc oxide catalyst. Further exemplified is a continuous flow tubular reactor operating at high total reactor pressures and high reactant and product partial pressures. And U.S. Pat. No. 4,652,685, which describes the hydrogenation of lactones to glycols.

[0323] A further downstream compound that can be produced form the 4-HB producing microbial organisms of the invention includes, for example, THF. This compound can be synthesized by, for example, chemical hydrogenation of GBL. One exemplary procedure well known in the art applicable for the conversion of GBL to THF includes, for example, chemical reduction of 4-HB and/or GBL or a mixture of these two components deriving from the culture using a heterogeneous or homogeneous hydrogenation catalyst together with hydrogen, or a hydride-based reducing agent used stoichiometrically or catalytically, to produce tetrahydrofuran. Other procedures well know in the art are equally applicable for the above chemical reaction and include, for example, U.S. Pat. No. 6,686,310, which describes high surface area sol-gel mute prepared hydrogenation catalysts. Processes for the reduction of maleic acid to tetrahydrofuran (THF) and 1,4-butanediol (BDO) and for the reduction of gamma butyrolactone to tetrahydrofuran and 1,4-butanediol also are described.

[0324] The culture conditions can include, for example, liquid culture procedures as well as fermentation and other large scale culture procedures. As described further below in the Examples, particularly useful yields of the biosynthetic products of the invention can be obtained under anaerobic or substantially anaerobic culture conditions.

[0325] Suitable purification and/or assays to test for the production of 4-HB, 4-HBal, 4-HBCoA, BDO or putrescine can be performed using well known methods. Suitable replicates such as triplicate cultures can be grown for each engineered strain to be tested. For example, product and byproduct formation in the engineered production host can be monitored. The final product and intermediates, and other organic compounds, can be analyzed by methods such as HPLC (High Performance Liquid Chromatography), GC-MS (Gas Chromatography-Mass Spectroscopy) and LC-MS (Liquid Chromatography-Mass Spectroscopy) or other suitable analytical methods using routine procedures well known in the art. The release of product in the fermentation broth can also be tested with the culture supematant. Byproducts and residual glucose can be quantified by HPLC using, for example, a refractive index detector for glucose and alcohols, and a UV detector for organic acids (Lin et al., Biotechnol. Bioeng. 90:775-779 (2005)), or other suitable assay and detection methods well known in the art. The individual enzyme or protein activities from the exogenous DNA sequences can also be assayed using methods well known in the art. In one embodiment, the invention provides a method that is an assay, wherein a first enzyme is used to generate a substrate for a second test enzyme. In particular, a carboxylic acid transferase 2 (cat2), also referred to herein as a 4-hydroxybutyrate coenzyme A transferase, is used to generate 4-hydroxybutyrl-CoA, which serves as a substrate for aldehyde dehydrogenase (see Example XXXXIII). Such an assay can be conveniently used to generate a substrate, in particular for an enzyme-coupled in vitro assay. The method includes providing a carboxylic acid transferase 2, with an appropriate substrate such as 4-hydroxybutyrate, and a test enzyme such as an aldehyde dehydrogenase. It is understood that such a method can utilize well known methods of testing for product formation (see Example XXXXIII).

[0326] The 4-HB, 4-HBal, 4-HBCoA, BDO or putrescine product can be separated from other components in the culture using a variety of methods well known in the art. Such separation methods include, for example, extraction procedures as well as methods that include continuous liquid-liquid extraction, pervaporation, membrane filtration, membrane separation, reverse osmosis, electrodialysis, distillation, crystallization, centrifugation, extractive filtration, ion exchange chromatography, size exclusion chromatography, adsorption chromatography, and ultrafiltration. All of the above methods are well known in the art.

[0327] The invention further provides a method of manufacturing 4-HB. The method includes fermenting a non-naturally occurring microbial organism having a 4-hydroxybutanoic acid (4-HB) biosynthetic pathway comprising at least one exogenous nucleic acid encoding 4-hydroxybutanoate dehydrogenase, CoA-independent succinic semialdehyde dehydrogenase, succinyl-CoA synthetase, CoA-dependent succinic semialdehyde dehydrogenase, glutamate:succinic semialdehyde transaminase, a-ketoglutarate decarboxylase, or glutamate decarboxylase under substantially anaerobic conditions for a sufficient period of time to produce monomeric 4-hydroxybutanoic acid (4-HB), the process comprising fed-batch fermentation and batch separation; fed-batch fermentation and continuous separation, or continuous fermentation and continuous separation.

[0328] The culture and chemical hydrogenations described above also can be scaled up and grown continuously for manufacturing of 4-HB, 4-HBal, 4-HBCoA, GBL, BDO and/or THF or putrescine. Exemplary growth procedures include, for example, fed-batch fermentation and batch separation; fed-batch fermentation and continuous separation, or continuous fermentation and continuous separation. All of these processes are well known in the art. Employing the 4-HB producers allows for simultaneous 4-HB biosynthesis and chemical conversion to GBL, BDO and/or THF by employing the above hydrogenation procedures simultaneous with continuous cultures methods such as fermentation. Other hydrogenation procedures also are well known in the art and can be equally applied to the methods of the invention.

[0329] Fermentation procedures are particularly useful for the biosynthetic production of commercial quantities of 4-HB, 4-HBal, 4-HBCoA, BDO or putrescine. Generally, and as with non-continuous culture procedures, the continuous and/or near-continuous production of 4-HB, 4-HBal, 4-HBCoA, BDO or putrescine will include culturing a non-naturally occurring 4-HB, 4-HBal, 4-HBCoA, BDO or putrescine producing organism of the invention in sufficient nutrients and medium to sustain and/or nearly sustain growth in an exponential phase. Continuous culture under such conditions can be include, for example, growth or culturing 1 day, 2, 3, 4, 5, 6 or 7 days or more. Additionally, continuous culture can include longer time periods 1 week, 2, 3, 4 or 5 or more weeks and up to several months. Alternatively, organisms of the invention can be cultured for hours, if suitable for a particular application. It is to be understood that the continuous and/or near-continuous culture conditions also can include all time intervals in between these exemplary periods. It is further understood that the time of culturing the microbial organism of the invention is for a sufficient period of time to produce a sufficient amount of product for a desired purpose.

[0330] Fermentation procedures are well known in the art. Briefly, fermentation for the biosynthetic production of 4-HB, 4-HBal, 4-HBCoA, BDO or putrescine or other 4-HB, 4-HBal, 4-HBCoA, BDO or putrescine derived products, including intermediates, of the invention can be utilized in, for example, fed-batch fermentation and batch separation; fed-batch fermentation and continuous separation, or continuous fermentation and continuous separation. Examples of batch and continuous fermentation procedures well known in the art are exemplified further below in the Examples.

[0331] In addition to the above fermentation procedures using the 4-HB, 4-HBal, 4-HBCoA, BDO or putrescine producers of the invention for continuous production of substantial quantities of 4-HB, 4-HBal, 4-HBCoA, BDO or putrescine, including monomeric 4-HB, respectively, the 4-HB producers also can be, for example, simultaneously subjected to chemical synthesis procedures to convert the product to other compounds or the product as described previously for the chemical conversion of monomeric 4-HB to, for example, GBL, BDO and/or THF. The BDO producers can similarly be, for example, simultaneously subjected to chemical synthesis procedures as described previously for the chemical conversion of BDO to, for example, THF, GBL, pyrrolidones and/or other BDO family compounds. In addition, the products of the 4-HB, 4-HBal, 4-HBCoA, BDO or putrescine producers can be separated from the fermentation culture and sequentially subjected to chemical or enzymatic conversion to convert the product to other compounds, if desired, as disclosed herein.

[0332] Briefly, hydrogenation of GBL in the fermentation broth can be performed as described by Frost et al., Biotechnology Progress 18: 201-211 (2002). Another procedure for hydrogenation during fermentation include, for example, the methods described in, for example, U.S. Pat. No. 5,478,952. This method is further exemplified in the Examples below.

[0333] Therefore, the invention additionally provides a method of manufacturing γ-butyrolactone (GBL), tetrahydrofuran (THF) or 1,4-butanediol (BDO). The method includes fermenting a non-naturally occurring microbial organism having 4-hydroxybutanoic acid (4-HB) and/or 1,4-butanediol (BDO) biosynthetic pathways, the pathways comprise at least one exogenous nucleic acid encoding 4-hydroxybutanoate dehydrogenase, CoA-independent succinic semialdehyde dehydrogenase, succinyl-CoA synthetase, CoA-dependent succinic semialdehyde dehydrogenase, 4-hydroxybutyrate:CoA transferase, glutamate:succinic semialdehyde transaminase, α-ketoglutarate decarboxylase, glutamate decarboxylase, 4-hydroxybutanoate kinase, phosphotransbutyrylase, CoA-independent 1,4-butanediol semialdehyde dehydrogenase, CoA-dependent 1,4-butanediol semialdehyde dehydrogenase, CoA-independent 1,4-butanediol alcohol dehydrogenase or CoA-dependent 1,4-butanediol alcohol dehydrogenase, under substantially anaerobic conditions for a sufficient period of time to produce 1,4-butanediol (BDO), GBL or THF, the fermenting comprising fed-batch fermentation and batch separation; fed-batch fermentation and continuous separation, or continuous fermentation and continuous separation.

[0334] In addition to the biosynthesis of 4-HB, 4-HBal, 4-HBCoA, BDO or putrescine and other products of the invention as described herein, the non-naturally occurring microbial organisms and methods of the invention also can be utilized in various combinations with each other and/or with other microbial organisms and methods well known in the art to achieve product biosynthesis by other mutes. For example, one alternative to produce BDO other than use of the 4-HB producers and chemical steps or other than use of the BDO producer directly is through addition of another microbial organism capable of converting 4-HB or a 4-HB product exemplified herein to BDO.

[0335] One such procedure includes, for example, the fermentation of a 4-HB producing microbial organism of the invention to produce 4-HB, as described above and below. The 4-HB can then be used as a substrate for a second microbial organism that converts 4-HB to, for example, BDO, GBL and/or THF. The 4-HB can be added directly to another culture of the second organism or the original culture of 4-HB producers can be depleted of these microbial organisms by, for example, cell separation, and then subsequent addition of the second organism to the fermentation broth can utilized to produce the final product without intermediate purification steps. One exemplary second organism having the capacity to biochemically utilize 4-HB as a substrate for conversion to BDO, for example, is Clostridium acetobutylicum (see, for example, Jewell et al., Current Microbiology, 13:215-19 (1986)).

[0336] Thus, such a procedure includes, for example, the fermentation of a microbial organism that produces a 4-HB, 4-HBal, 4-HBCoA, BDO or putrescine pathway intermediate. The 4-HB, 4-HBal, 4-HBCoA, BDO or putrescine pathway intermediate can then be used as a substrate for a second microbial organism that converts the 4-HB, 4-HBal, 4-HBCoA, BDO or putrescine pathway intermediate to 4-HB, 4-HBal, 4-HBCoA, BDO or putrescine. The 4-HB, 4-HBal, 4-HBCoA, BDO or putrescine pathway intermediate can be added directly to another culture of the second organism or the original culture of the 4-HB, 4-HBal, 4-HBCoA BDO or putrescine pathway intermediate producers can be depleted of these microbial organisms by, for example, cell separation, and then subsequent addition of the second organism to the fermentation broth can be utilized to produce the final product without intermediate purification steps.

[0337] In other embodiments, the non-naturally occurring microbial organisms and methods of the invention can be assembled in a wide variety of subpathways to achieve biosynthesis of, for example, 4-HB and/or BDO and/or other pathway intermediates as described. In these embodiments, biosynthetic pathways for a desired product of the invention can be segregated into different microbial organisms, and the different microbial organisms can be co-cultured to produce the final product. In such a biosynthetic scheme, the product of one microbial organism is the substrate for a second microbial organism until the final product is synthesized. For example, the biosynthesis of BDO can be accomplished as described herein by constructing a microbial organism that contains biosynthetic pathways for conversion of one pathway intermediate to another pathway intermediate or the product, for example, a substrate such as endogenous succinate through 4-HB to the final product BDO. Alternatively, BDO also can be biosynthetically produced from microbial organisms through co-culture or co-fermentation using two organisms in the same vessel. A first microbial organism being a 4-HB producer with genes to produce 4-HB from succinic acid, and a second microbial organism being a BDO producer with genes to convert 4-HB to BDO. For example, the biosynthesis of 4-HB, 4-HBal, 4-HBCoA, BDO or putrescine can be accomplished by constructing a microbial organism that contains biosynthetic pathways for conversion of one pathway intermediate to another pathway intermediate or the product. Alternatively, 4-HB, 4-HBal, 4-HBCoA, BDO or putrescine also can be biosynthetically produced from microbial organisms through co-culture or co-fermentation using two organisms in the same vessel, where the first microbial organism produces a 4-HB, 4-HBal, 4-HBCoA, BDO or putrescine intermediate and the second microbial organism converts the intermediate to 4-HB, 4-HBal, 4-HBCoA, BDO or putrescine.

[0338] Given the teachings and guidance provided herein, those skilled in the art will understand that a wide variety of combinations and permutations exist for the non-naturally occurring microbial organisms and methods of the invention together with other microbial organisms, with the co-culture of other non-naturally occurring microbial organisms having subpathways and with combinations of other chemical and/or biochemical procedures well known in the art to produce 4-HB, 4-HBal, BDO, GBL, THF and putrescine products of the invention.

[0339] Similarly, it is understood by those skilled in the art that a host organism can be selected based on desired characteristics for introduction of one or more gene disruptions to increase production of 4-HB, 4-HBal, 4-HBCoA, BDO or putrescine. Thus, it is understood that, if a genetic modification is to be introduced into a host organism to disrupt a gene, any homologs, orthologs or paralogs that catalyze similar, yet non-identical metabolic reactions can similarly be disrupted to ensure that a desired metabolic reaction is sufficiently disrupted. Because certain differences exist among metabolic networks between different organisms, those skilled in the art will understand that the actual genes disrupted in a given organism may differ between organisms. However, given the teachings and guidance provided herein, those skilled in the art also will understand that the methods of the invention can be applied to any suitable host microorganism to identify the cognate metabolic alterations needed to construct an organism in a species of interest that will increase 4-HB, 4-HBal, 4-HBCoA, BDO or putrescine biosynthesis. In a particular embodiment, the increased production couples biosynthesis of 4-HB, 4-HBal, 4-HBCoA, BDO or putrescine to growth of the organism, and can obligatorily couple production of 4-HB, 4-HBal, 4-HBCoA, BDO or putrescine to growth of the organism if desired and as disclosed herein.

[0340] It is understood that, in methods of the invention, any of the one or more exogenous nucleic acids can be introduced into a microbial organism to produce a non-naturally occurring microbial organism of the invention. The nucleic acids can be introduced so as to confer, for example, a 4-HB, 4-HBal, 4-HBCoA, BDO or putrescine biosynthetic pathway onto the microbial organism. Alternatively, encoding nucleic acids can be introduced to produce an intermediate microbial organism having the biosynthetic capability to catalyze some of the required reactions to confer 4-HB, 4-HBal, 4-HBCoA, BDO or putrescine biosynthetic capability. For example, a non-naturally occurring microbial organism having a 4-HB, 4-HBal, 4-HBCoA, BDO or putrescine biosynthetic pathway can comprise at least two exogenous nucleic acids encoding desired enzymes or proteins, such as the combination of enzymes as disclosed herein (see Examples and FIGS. 1, 8-13, 58, 62, 63, 69 and 70), and the like. Thus, it is understood that any combination of two or more enzymes or proteins of a biosynthetic pathway can be included in a non-naturally occurring microbial organism of the invention. Similarly, it is understood that any combination of three or more enzymes or proteins of a biosynthetic pathway can be included in a non-naturally occurring microbial organism of the invention, for example,], and so forth, as desired and disclosed herein, so long as the combination of enzymes and/or proteins of the desired biosynthetic pathway results in production of the corresponding desired product. Similarly, any combination of four or more enzymes or proteins of a biosynthetic pathway as disclosed herein can be included in a non-naturally occurring microbial organism of the invention, as desired, so long as the combination of enzymes and/or proteins of the desired biosynthetic pathway results in production of the corresponding desired product.

[0341] To generate better producers, metabolic modeling can be utilized to optimize growth conditions. Modeling can also be used to design gene knockouts that additionally optimize utilization of the pathway (see, for example, U.S. patent publications US 2002/0012939, US 2003/0224363, US 2004/0029149, US 2004/0072723, US 2003/0059792, US 2002/0168654 and US 2004/0009466, and U.S. Pat. No. 7,127,379). Modeling analysis allows reliable predictions of the effects on cell growth of shifting the metabolism towards more efficient production of 4-HB, 4-HBal, 4-HBCoA, BDO or putrescine.

[0342] One computational method for identifying and designing metabolic alterations favoring biosynthesis of a desired product is the OptKnock computational framework (Burgard et al., Biotechnol. Bioeng. 84:647-657 (2003)). OptKnock is a metabolic modeling and simulation program that suggests gene deletion or disruption strategies that result in genetically stable microorganisms which overproduce the target product. Specifically, the framework examines the complete metabolic and/or biochemical network of a microorganism in order to suggest genetic manipulations that force the desired biochemical to become an obligatory byproduct of cell growth. By coupling biochemical production with cell growth through strategically placed gene deletions or other functional gene disruption, the growth selection pressures imposed on the engineered strains after long periods of time in a bioreactor lead to improvements in performance as a result of the compulsory growth-coupled biochemical production. Lastly, when gene deletions are constructed there is a negligible possibility of the designed strains reverting to their wild-type states because the genes selected by OptKnock are to be completely removed from the genome. Therefore, this computational methodology can be used to either identify alternative pathways that lead to biosynthesis of a desired product or used in connection with the non-naturally occurring microbial organisms for further optimization of biosynthesis of a desired product.

[0343] Briefly, OptKnock is a term used herein to refer to a computational method and system for modeling cellular metabolism. The OptKnock program relates to a framework of models and methods that incorporate particular constraints into flux balance analysis (FBA) models. These constraints include, for example, qualitative kinetic information, qualitative regulatory information, and/or DNA microarray experimental data. OptKnock also computes solutions to various metabolic problems by, for example, tightening the flux boundaries derived through flux balance models and subsequently probing the performance limits of metabolic networks in the presence of gene additions or deletions. OptKnock computational framework allows the construction of model formulations that allow an effective query of the performance limits of metabolic networks and provides methods for solving the resulting mixed-integer linear programming problems. The metabolic modeling and simulation methods referred to herein as OptKnock are described in, for example, U.S. publication 2002/0168654, filed Jan. 10, 2002, in International Patent No. PCT/US02/00660, filed Jan. 10, 2002, and U.S. publication 2009/0047719, filed Aug. 10, 2007.

[0344] Another computational method for identifying and designing metabolic alterations favoring biosynthetic production of a product is a metabolic modeling and simulation system termed SimPheny®. This computational method and system is described in, for example, U.S. publication 2003/0233218, filed Jun. 14, 2002, and in International Patent Application No. PCT/US03/18838, filed Jun. 13, 2003. SimPheny® is a computational system that can be used to produce a network model in silico and to simulate the flux of mass, energy or charge through the chemical reactions of a biological system to define a solution space that contains any and all possible functionalities of the chemical reactions in the system, thereby determining a range of allowed activities for the biological system. This approach is referred to as constraints-based modeling because the solution space is defined by constraints such as the known stoichiometry of the included reactions as well as reaction thermodynamic and capacity constraints associated with maximum fluxes through reactions. The space defined by these constraints can be interrogated to determine the phenotypic capabilities and behavior of the biological system or of its biochemical components.

[0345] These computational approaches are consistent with biological realities because biological systems are flexible and can reach the same result in many different ways. Biological systems are designed through evolutionary mechanisms that have been restricted by fundamental constraints that all living systems must face. Therefore, constraints-based modeling strategy embraces these general realities. Further, the ability to continuously impose further restrictions on a network model via the tightening of constraints results in a reduction in the size of the solution space, thereby enhancing the precision with which physiological performance or phenotype can be predicted.

[0346] Given the teachings and guidance provided herein, those skilled in the art will be able to apply various computational frameworks for metabolic modeling and simulation to design and implement biosynthesis of a desired compound in host microbial organisms. Such metabolic modeling and simulation methods include, for example, the computational systems exemplified above as SimPheny® and OptKnock. For illustration of the invention, some methods are described herein with reference to the OptKnock computation framework for modeling and simulation. Those skilled in the art will know how to apply the identification, design and implementation of the metabolic alterations using OptKnock to any of such other metabolic modeling and simulation computational frameworks and methods well known in the art.

[0347] The methods described above will provide one set of metabolic reactions to disrupt. Elimination of each reaction within the set or metabolic modification can result in a desired product as an obligatory product during the growth phase of the organism. Because the reactions are known, a solution to the bilevel OptKnock problem also will provide the associated gene or genes encoding one or more enzymes that catalyze each reaction within the set of reactions. Identification of a set of reactions and their corresponding genes encoding the enzymes participating in each reaction is generally an automated process, accomplished through correlation of the reactions with a reaction database having a relationship between enzymes and encoding genes.

[0348] Once identified, the set of reactions that are to be disrupted in order to achieve production of a desired product are implemented in the target cell or organism by functional disruption of at least one gene encoding each metabolic reaction within the set. One particularly useful means to achieve functional disruption of the reaction set is by deletion of each encoding gene. However, in some instances, it can be beneficial to disrupt the reaction by other genetic aberrations including, for example, mutation, deletion of regulatory regions such as promoters or cis binding sites for regulatory factors, or by truncation of the coding sequence at any of a number of locations. These latter aberrations, resulting in less than total deletion of the gene set can be useful, for example, when rapid assessments of the coupling of a product are desired or when genetic reversion is less likely to occur.

[0349] To identify additional productive solutions to the above described bilevel OptKnock problem which lead to further sets of reactions to disrupt or metabolic modifications that can result in the biosynthesis, including growth-coupled biosynthesis of a desired product, an optimization method, termed integer cuts, can be implemented. This method proceeds by iteratively solving the OptKnock problem exemplified above with the incorporation of an additional constraint referred to as an integer cut at each iteration. Integer cut constraints effectively prevent the solution procedure from choosing the exact same set of reactions identified in any previous iteration that obligatorily couples product biosynthesis to growth. For example, if a previously identified growth-coupled metabolic modification specifies reactions 1, 2, and 3 for disruption, then the following constraint prevents the same reactions from being simultaneously considered in subsequent solutions. The integer cut method is well known in the art and can be found described in, for example, Burgard et al., Biotechnol. Prog. 17:791-797 (2001). As with all methods described herein with reference to their use in combination with the OptKnock computational framework for metabolic modeling and simulation, the integer cut method of reducing redundancy in iterative computational analysis also can be applied with other computational frameworks well known in the art including, for example, SimPheny®.

[0350] The methods exemplified herein allow the construction of cells and organisms that biosynthetically produce a desired product, including the obligatory coupling of production of a target biochemical product to growth of the cell or organism engineered to harbor the identified genetic alterations. Therefore, the computational methods described herein allow the identification and implementation of metabolic modifications that are identified by an in silico method selected from OptKnock or SimPheny®. The set of metabolic modifications can include, for example, addition of one or more biosynthetic pathway enzymes and/or functional disruption of one or more metabolic reactions including, for example, disruption by gene deletion.

[0351] As discussed above, the OptKnock methodology was developed on the premise that mutant microbial networks can be evolved towards their computationally predicted maximum-growth phenotypes when subjected to long periods of growth selection. In other words, the approach leverages an organism's ability to self-optimize under selective pressures. The OptKnock framework allows for the exhaustive enumeration of gene deletion combinations that force a coupling between biochemical production and cell growth based on network stoichiometry. The identification of optimal gene/reaction knockouts requires the solution of a bilevel optimization problem that chooses the set of active reactions such that an optimal growth solution for the resulting network overproduces the biochemical of interest (Burgard et al., Biotechnol. Bioeng. 84:647-657 (2003)).

[0352] An in silico stoichiometric model of E. coli metabolism can be employed to identify essential genes for metabolic pathways as exemplified previously and described in, for example, U.S. patent publications US 2002/0012939, US 2003/0224363, US 2004/0029149, US 2004/0072723, US 2003/0059792, US 2002/0168654 and US 2004/0009466, and in U.S. Pat. No. 7,127,379. As disclosed herein, the OptKnock mathematical framework can be applied to pinpoint gene deletions leading to the growth-coupled production of a desired product. Further, the solution of the bilevel OptKnock problem provides only one set of deletions. To enumerate all meaningful solutions, that is, all sets of knockouts leading to growth-coupled production formation, an optimization technique, termed integer cuts, can be implemented. This entails iteratively solving the OptKnock problem with the incorporation of an additional constraint referred to as an integer cut at each iteration, as discussed above.

[0353] The methods exemplified above and further illustrated in the Examples below allow the construction of cells and organisms that biosynthetically produce, including obligatory couple production of a target biochemical product to growth of the cell or organism engineered to harbor the identified genetic alterations. In this regard, metabolic alterations have been identified that result in the biosynthesis of 4-HB and 1,4-butanediol. Microorganism strains constructed with the identified metabolic alterations produce elevated levels of 4-HB, 4-HBal, 4-HBCoA, BDO or putrescine compared to unmodified microbial organisms. These strains can be beneficially used for the commercial production of 4-HB, BDO, THF, GBL, 4-HBal, 4-HBCoA or putrescine, for example, in continuous fermentation process without being subjected to the negative selective pressures.

[0354] Therefore, the computational methods described herein allow the identification and implementation of metabolic modifications that are identified by an in silico method selected from OptKnock or SimPheny®. The set of metabolic modifications can include, for example, addition of one or more biosynthetic pathway enzymes and/or functional disruption of one or more metabolic reactions including, for example, disruption by gene deletion.

[0355] Any of the non-naturally occurring microbial organisms described herein can be cultured to produce and/or secrete the biosynthetic products of the invention. For example, the 4-HB, 4-HBal, 4-HBCoA, BDO or putrescine producers can be cultured for the biosynthetic production of 4-HB, 4-HBal, 4-HBCoA, BDO or putrescine. Accordingly, in some embodiments, the invention provides culture medium having 4-HB, 4-HBal, 4-HBCoA, BDO or putrescine or a 4-HB, 4-HBal, 4-HBCoA, BDO or putrescine pathway intermediate described herein. In some aspects, the culture medium can also be separated from the non-naturally occurring microbial organisms of the invention that produced the 4-HB, 4-HBal, 4-HBCoA, BDO or putrescine or 4-HB, 4-HBal, 4-HBCoA, BDO or putrescine pathway intermediate. Methods for separating a microbial organism from culture medium are well known in the art. Exemplary methods include filtration, flocculation, precipitation, centrifugation, sedimentation, and the like.

[0356] For the production of 4-HB, 4-HBal, 4-HBCoA, BDO or putrescine, the recombinant strains are cultured in a medium with carbon source and other essential nutrients. It is sometimes desirable and can be highly desirable to maintain anaerobic conditions in the fermenter to reduce the cost of the overall process. Such conditions can be obtained, for example, by first sparging the medium with nitrogen and then sealing the flasks with a septum and crimp-cap. For strains where growth is not observed anaerobically, microaerobic or substantially anaerobic conditions can be applied by perforating the septum with a small hole for limited aeration. Exemplary anaerobic conditions have been described previously and are well-known in the art. Exemplary aerobic and anaerobic conditions are described, for example, in U.S. publication 2009/0047719, filed Aug. 10, 2007. Fermentations can be performed in a batch, fed-batch or continuous manner, as disclosed herein. Fermentations can also be conducted in two phases, if desired. The first phase can be aerobic to allow for high growth and therefore high productivity, followed by an anaerobic phase of high 4-HB, 4-HBal, 4-HBCoA, BDO or putrescine yields.

[0357] If desired, the pH of the medium can be maintained at a desired pH, in particular neutral pH, such as a pH of around 7 by addition of a base, such as NaOH or other bases, or acid, as needed to maintain the culture medium at a desirable pH. The growth rate can be determined by measuring optical density using a spectrophotometer (600 nm), and the glucose uptake rate by monitoring carbon source depletion over time.

[0358] In addition to renewable feedstocks such as those exemplified above, the 4-HB, 4-HBal, 4-HBCoA, BDO or putrescine producing microbial organisms of the invention also can be modified for growth on syngas as its source of carbon. In this specific embodiment, one or more proteins or enzymes are expressed in the 4-HB, 4-HBal, 4-HBCoA, BDO or putrescine producing organisms to provide a metabolic pathway for utilization of syngas or other gaseous carbon source.

[0359] Synthesis gas, also known as syngas or producer gas, is the major product of gasification of coal and of carbonaceous materials such as biomass materials, including agricultural crops and residues. Syngas is a mixture primarily of H₂ and CO and can be obtained from the gasification of any organic feedstock, including but not limited to coal, coal oil, natural gas, biomass, and waste organic matter. Gasification is generally carried out under a high fuel to oxygen ratio. Although largely H₂ and CO, syngas can also include CO₂ and other gases in smaller quantities. Thus, synthesis gas provides a cost effective source of gaseous carbon such as CO and, additionally, CO₂.

[0360] The Wood-Ljungdahl pathway catalyzes the conversion of CO and H₂ to acetyl-CoA and other products such as acetate. Organisms capable of utilizing CO and syngas also generally have the capability of utilizing CO₂ and CO₂/H₂ mixtures through the same basic set of enzymes and transformations encompassed by the Wood-Ljungdahl pathway. H₂-dependent conversion of CO₂ to acetate by microorganisms was recognized long before it was revealed that CO also could be used by the same organisms and that the same pathways were involved. Many acetogens have been shown to grow in the presence of CO₂ and produce compounds such as acetate as long as hydrogen is present to supply the necessary reducing equivalents (see for example, Drake, Acetogenesis, pp. 3-60 Chapman and Hall, New York, (1994)). This can be summarized by the following equation:

2CO₂+4H₂+nADP+nPi→CH₃COOH+2H₂O+nATP

Hence, non-naturally occurring microorganisms possessing the Wood-Ljungdahl pathway can utilize CO₂ and H₂ mixtures as well for the production of acetyl-CoA and other desired products.

[0361] The Wood-Ljungdahl pathway is well known in the art and consists of 12 reactions which can be separated into two branches: (1) methyl branch and (2) carbonyl branch. The methyl branch converts syngas to methyl-tetrahydrofolate (methyl-THF) whereas the carbonyl branch converts methyl-THF to acetyl-CoA. The reactions in the methyl branch are catalyzed in order by the following enzymes or proteins: ferredoxin oxidoreductase, formate dehydrogenase, formyltetrahydrofolate synthetase, methenyltetrahydrofolate cyclodehydratase, methylenetetrahydrofolate dehydrogenase and methylenetetrahydrofolate reductase. The reactions in the carbonyl branch are catalyzed in order by the following enzymes or proteins: methyltetrahydrofolate:corrinoid protein methyltransferase (for example, AcsE), corrinoid iron-sulfur protein, nickel-protein assembly protein (for example, AcsF), ferredoxin, acetyl-CoA synthase, carbon monoxide dehydrogenase and nickel-protein assembly protein (for example, CooC). Following the teachings and guidance provided herein for introducing a sufficient number of encoding nucleic acids to generate a 4-HB, 4-HBal, 4-HBCoA, BDO or putrescine pathway, those skilled in the art will understand that the same engineering design also can be performed with respect to introducing at least the nucleic acids encoding the Wood-Ljungdahl enzymes or proteins absent in the host organism. Therefore, introduction of one or more encoding nucleic acids into the microbial organisms of the invention such that the modified organism contains the complete Wood-Ljungdahl pathway will confer syngas utilization ability.

[0362] Additionally, the reductive (reverse) tricarboxylic acid cycle coupled with carbon monoxide dehydrogenase and/or hydrogenase activities can also be used for the conversion of CO, CO₂ and/or H₂ to acetyl-CoA and other products such as acetate. Organisms capable of fixing carbon via the reductive TCA pathway can utilize one or more of the following enzymes: ATP citrate-lyase, citrate lyase, aconitase, isocitrate dehydrogenase, alpha-ketoglutarate:ferredoxin oxidoreductase, succinyl-CoA synthetase, succinyl-CoA transferase, fumarate reductase, fumarase, malate dehydrogenase, NAD(P)H:ferredoxin oxidoreductase, carbon monoxide dehydrogenase, and hydrogenase. Specifically, the reducing equivalents extracted from CO and/or H₂ by carbon monoxide dehydrogenase and hydrogenase are utilized to fix CO₂ via the reductive TCA cycle into acetyl-CoA or acetate. Acetate can be converted to acetyl-CoA by enzymes such as acetyl-CoA transferase, acetate kinase/phosphotransacetylase, and acetyl-CoA synthetase. Acetyl-CoA can be converted to the 4-HB, 4-HBal, 4-HBCoA, BDO or putrescine precursors, glyceraldehyde-3-phosphate, phosphoenolpyruvate, and pyruvate, by pyruvate:ferredoxin oxidoreductase and the enzymes of gluconeogenesis. Following the teachings and guidance provided herein for introducing a sufficient number of encoding nucleic acids to generate a 4-HB, 4-HBal, 4-HBCoA, BDO or putrescine pathway, those skilled in the art will understand that the same engineering design also can be performed with respect to introducing at least the nucleic acids encoding the reductive TCA pathway enzymes or proteins absent in the host organism. Therefore, introduction of one or more encoding nucleic acids into the microbial organisms of the invention such that the modified organism contains the complete reductive TCA pathway will confer syngas utilization ability.

[0363] Accordingly, given the teachings and guidance provided herein, those skilled in the art will understand that a non-naturally occurring microbial organism can be produced that secretes the biosynthesized compounds of the invention when grown on a carbon source such as a carbohydrate. Such compounds include, for example, 4-HB, 4-HBal, 4-HBCoA, BDO or putrescine and any of the intermediate metabolites in the 4-HB, 4-HBal, 4-HBCoA, BDO or putrescine pathway. All that is required is to engineer in one or more of the required enzyme or protein activities to achieve biosynthesis of the desired compound or intermediate including, for example, inclusion of some or all of the 4-HB, 4-HBal, 4-HBCoA, BDO or putrescine biosynthetic pathways. Accordingly, the invention provides a non-naturally occurring microbial organism that produces and/or secretes 4-HB, 4-HBal, 4-HBCoA, BDO or putrescine when grown on a carbohydrate or other carbon source and produces and/or secretes any of the intermediate metabolites shown in the 4-HB, 4-HBal, 4-HBCoA, BDO or putrescine pathway when grown on a carbohydrate or other carbon source. The 4-HB, 4-HBal, 4-HBCoA, BDO or putrescine producing microbial organisms of the invention can initiate synthesis from an intermediate in a 4-HB, 4-HBal, 4-HBCoA, BDO or putrescine pathway, as disclosed herein.

[0364] To generate better producers, metabolic modeling can be utilized to optimize growth conditions. Modeling can also be used to design gene knockouts that additionally optimize utilization of the pathway (see, for example, U.S. patent publications US 2002/0012939, US 2003/0224363, US 2004/0029149, US 2004/0072723, US 2003/0059792, US 2002/0168654 and US 2004/0009466, and U.S. Pat. No. 7,127,379). Modeling analysis allows reliable predictions of the effects on cell growth of shifting the metabolism towards more efficient production of 4-HB, 4-HBal, 4-HBCoA, BDO or putrescine.

[0365] One computational method for identifying and designing metabolic alterations favoring biosynthesis of a desired product is the OptKnock computational framework (Burgard et al., Biotechnol. Bioeng. 84:647-657 (2003)). OptKnock is a metabolic modeling and simulation program that suggests gene deletion strategies that result in genetically stable microorganisms which overproduce the target product. Specifically, the framework examines the complete metabolic and/or biochemical network of a microorganism in order to suggest genetic manipulations that force the desired biochemical to become an obligatory byproduct of cell growth. By coupling biochemical production with cell growth through strategically placed gene deletions or other functional gene disruption, the growth selection pressures imposed on the engineered strains after long periods of time in a bioreactor lead to improvements in performance as a result of the compulsory growth-coupled biochemical production. Lastly, when gene deletions are constructed there is a negligible possibility of the designed strains reverting to their wild-type states because the genes selected by OptKnock are to be completely removed from the genome. Therefore, this computational methodology can be used to either identify alternative pathways that lead to biosynthesis of a desired product or used in connection with the non-naturally occurring microbial organisms for further optimization of biosynthesis of a desired product.

[0366] Briefly, OptKnock is a term used herein to refer to a computational method and system for modeling cellular metabolism. The OptKnock program relates to a framework of models and methods that incorporate particular constraints into flux balance analysis (FBA) models. These constraints include, for example, qualitative kinetic information, qualitative regulatory information, and/or DNA microarray experimental data. OptKnock also computes solutions to various metabolic problems by, for example, tightening the flux boundaries derived through flux balance models and subsequently probing the performance limits of metabolic networks in the presence of gene additions or deletions. OptKnock computational framework allows the construction of model formulations that allow an effective query of the performance limits of metabolic networks and provides methods for solving the resulting mixed-integer linear programming problems. The metabolic modeling and simulation methods referred to herein as OptKnock are described in, for example, U.S. publication 2002/0168654, filed Jan. 10, 2002, in International Patent No. PCT/US02/00660, filed Jan. 10, 2002, and U.S. publication 2009/0047719, filed Aug. 10, 2007.

[0367] Another computational method for identifying and designing metabolic alterations favoring biosynthetic production of a product is a metabolic modeling and simulation system termed SimPheny®. This computational method and system is described in, for example, U.S. publication 2003/0233218, filed Jun. 14, 2002, and in International Patent Application No. PCT/US03/18838, filed Jun. 13, 2003 (WO/2003/106998). SimPheny® is a computational system that can be used to produce a network model in silico and to simulate the flux of mass, energy or charge through the chemical reactions of a biological system to define a solution space that contains any and all possible functionalities of the chemical reactions in the system, thereby determining a range of allowed activities for the biological system. This approach is referred to as constraints-based modeling because the solution space is defined by constraints such as the known stoichiometry of the included reactions as well as reaction thermodynamic and capacity constraints associated with maximum fluxes through reactions. The space defined by these constraints can be interrogated to determine the phenotypic capabilities and behavior of the biological system or of its biochemical components.

[0368] These computational approaches are consistent with biological realities because biological systems are flexible and can reach the same result in many different ways. Biological systems are designed through evolutionary mechanisms that have been restricted by fundamental constraints that all living systems must face. Therefore, constraints-based modeling strategy embraces these general realities. Further, the ability to continuously impose further restrictions on a network model via the tightening of constraints results in a reduction in the size of the solution space, thereby enhancing the precision with which physiological performance or phenotype can be predicted.

[0369] Given the teachings and guidance provided herein, those skilled in the art will be able to apply various computational frameworks for metabolic modeling and simulation to design and implement biosynthesis of a desired compound in host microbial organisms. Such metabolic modeling and simulation methods include, for example, the computational systems exemplified above as SimPheny® and OptKnock. For illustration of the invention, some methods are described herein with reference to the OptKnock computation framework for modeling and simulation. Those skilled in the art will know how to apply the identification, design and implementation of the metabolic alterations using OptKnock to any of such other metabolic modeling and simulation computational frameworks and methods well known in the art.

[0370] The methods described above will provide one set of metabolic reactions to disrupt. Elimination of each reaction within the set or metabolic modification can result in a desired product as an obligatory product during the growth phase of the organism. Because the reactions are known, a solution to the bilevel OptKnock problem also will provide the associated gene or genes encoding one or more enzymes that catalyze each reaction within the set of reactions. Identification of a set of reactions and their corresponding genes encoding the enzymes participating in each reaction is generally an automated process, accomplished through correlation of the reactions with a reaction database having a relationship between enzymes and encoding genes.

[0371] Once identified, the set of reactions that are to be disrupted in order to achieve production of a desired product are implemented in the target cell or organism by functional disruption of at least one gene encoding each metabolic reaction within the set. One particularly useful means to achieve functional disruption of the reaction set is by deletion of each encoding gene. However, in some instances, it can be beneficial to disrupt the reaction by other genetic aberrations including, for example, mutation, deletion of regulatory regions such as promoters or cis binding sites for regulatory factors, or by truncation of the coding sequence at any of a number of locations. These latter aberrations, resulting in less than total deletion of the gene set can be useful, for example, when rapid assessments of the coupling of a product are desired or when genetic reversion is less likely to occur.

[0372] To identify additional productive solutions to the above described bilevel OptKnock problem which lead to further sets of reactions to disrupt or metabolic modifications that can result in the biosynthesis, including growth-coupled biosynthesis of a desired product, an optimization method, termed integer cuts, can be implemented. This method proceeds by iteratively solving the OptKnock problem exemplified above with the incorporation of an additional constraint referred to as an integer cut at each iteration. Integer cut constraints effectively prevent the solution procedure from choosing the exact same set of reactions identified in any previous iteration that obligatorily couples product biosynthesis to growth. For example, if a previously identified growth-coupled metabolic modification specifies reactions 1, 2, and 3 for disruption, then the following constraint prevents the same reactions from being simultaneously considered in subsequent solutions. The integer cut method is well known in the art and can be found described in, for example, Burgard et al., Biotechnol. Prog. 17:791-797 (2001). As with all methods described herein with reference to their use in combination with the OptKnock computational framework for metabolic modeling and simulation, the integer cut method of reducing redundancy in iterative computational analysis also can be applied with other computational frameworks well known in the art including, for example, SimPheny®.

[0373] The methods exemplified herein allow the construction of cells and organisms that biosynthetically produce a desired product, including the obligatory coupling of production of a target biochemical product to growth of the cell or organism engineered to harbor the identified genetic alterations. Therefore, the computational methods described herein allow the identification and implementation of metabolic modifications that are identified by an in silico method selected from OptKnock or SimPheny®. The set of metabolic modifications can include, for example, addition of one or more biosynthetic pathway enzymes and/or functional disruption of one or more metabolic reactions including, for example, disruption by gene deletion.

[0374] As discussed above, the OptKnock methodology was developed on the premise that mutant microbial networks can be evolved towards their computationally predicted maximum-growth phenotypes when subjected to long periods of growth selection. In other words, the approach leverages an organism's ability to self-optimize under selective pressures. The OptKnock framework allows for the exhaustive enumeration of gene deletion combinations that force a coupling between biochemical production and cell growth based on network stoichiometry. The identification of optimal gene/reaction knockouts requires the solution of a bilevel optimization problem that chooses the set of active reactions such that an optimal growth solution for the resulting network overproduces the biochemical of interest (Burgard et al., Biotechnol. Bioeng. 84:647-657 (2003)).

[0375] An in silico stoichiometric model of E. coli metabolism can be employed to identify essential genes for metabolic pathways as exemplified previously and described in, for example, U.S. patent publications US 2002/0012939, US 2003/0224363, US 2004/0029149, US 2004/0072723, US 2003/0059792, US 2002/0168654 and US 2004/0009466, and in U.S. Pat. No. 7,127,379. As disclosed herein, the OptKnock mathematical framework can be applied to pinpoint gene deletions leading to the growth-coupled production of a desired product. Further, the solution of the bilevel OptKnock problem provides only one set of deletions. To enumerate all meaningful solutions, that is, all sets of knockouts leading to growth-coupled production formation, an optimization technique, termed integer cuts, can be implemented. This entails iteratively solving the OptKnock problem with the incorporation of an additional constraint referred to as an integer cut at each iteration, as discussed above.

[0376] Employing the methods exemplified above and herein, the methods of the invention allow the construction of cells and organisms that increase production of a desired product, for example, by coupling the production of a desired product to growth of the cell or organism engineered to harbor the identified genetic alterations. As disclosed herein, metabolic alterations have been identified that couple the production of 4-HB, 4-HBal, 4-HBCoA, BDO or putrescine to growth of the organism. Microbial organism strains constructed with the identified metabolic alterations produce elevated levels, relative to the absence of the metabolic alterations, of 4-HB, 4-HBal, 4-HBCoA, BDO or putrescine during the exponential growth phase. These strains can be beneficially used for the commercial production of 4-HB, 4-HBal, 4-HBCoA, BDO or putrescine in continuous fermentation process without being subjected to the negative selective pressures described previously. Although exemplified herein as metabolic alterations, in particular one or more gene disruptions, that confer growth coupled production of 4-HB, 4-HBal, 4-HBCoA, BDO or putrescine, it is understood that any gene disruption that increases the production of 4-HB, 4-HBal, 4-HBCoA, BDO or putrescine can be introduced into a host microbial organism, as desired.

[0377] Therefore, the methods of the invention provide a set of metabolic modifications that are identified by an in silico method such as OptKnock. The set of metabolic modifications can include functional disruption of one or more metabolic reactions including, for example, disruption by gene deletion. For 4-HB, 4-HBal, 4-HBCoA, BDO or putrescine production, metabolic modifications can be selected from the set of metabolic modifications described herein, including the Examples.

[0378] Also provided is a method of producing a non-naturally occurring microbial organisms having stable growth-coupled production of 4-HB, 4-HBal, 4-HBCoA, BDO or putrescine. The method can include identifying in silico a set of metabolic modifications that increase production of 4-HB, 4-HBal, 4-HBCoA, BDO or putrescine, for example, increase production during exponential growth; genetically modifying an organism to contain the set of metabolic modifications that increase production of 4-HB, 4-HBal, 4-HBCoA, BDO or putrescine, and culturing the genetically modified organism. If desired, culturing can include adaptively evolving the genetically modified organism under conditions requiring production of 4-HB, 4-HBal, 4-HBCoA, BDO or putrescine. The methods of the invention are applicable to bacterium, yeast and fungus as well as a variety of other cells and microorganism, as disclosed herein.

[0379] Thus, the invention provides a non-naturally occurring microbial organism comprising one or more gene disruptions that confer increased production of 4-HB, 4-HBal, 4-HBCoA, BDO or putrescine. In one embodiment, the one or more gene disruptions confer growth-coupled production of 4-HB, 4-HBal, 4-HBCoA, BDO or putrescine, and can, for example, confer stable growth-coupled production of 4-HB, 4-HBal, 4-HBCoA, BDO or putrescine. In another embodiment, the one or more gene disruptions can confer obligatory coupling of 4-HB, 4-HBal, 4-HBCoA, BDO or putrescine production to growth of the microbial organism. Such one or more gene disruptions reduce the activity of the respective one or more encoded enzymes.

[0380] The non-naturally occurring microbial organism can have one or more gene disruptions included in a metabolic modification as described herein. As disclosed herein, the one or more gene disruptions can be a deletion. Such non-naturally occurring microbial organisms of the invention include bacteria, yeast, fungus, or any of a variety of other microorganisms applicable to fermentation processes, as disclosed herein.

[0381] Thus, the invention provides a non-naturally occurring microbial organism, comprising one or more gene disruptions, where the one or more gene disruptions occur in genes encoding proteins or enzymes where the one or more gene disruptions confer increased production of 4-HB, 4-HBal, 4-HBCoA, BDO or putrescine in the organism. The production of 4-HB, 4-HBal, 4-HBCoA, BDO or putrescine can be growth-coupled or not growth-coupled. In a particular embodiment, the production of 4-HB, 4-HBal, 4-HBCoA, BDO or putrescine can be obligatorily coupled to growth of the organism, as disclosed herein.

[0382] The invention provides non naturally occurring microbial organisms having genetic alterations such as gene disruptions that increase production of 4-HB, 4-HBal, 4-HBCoA, BDO or putrescine, for example, growth-coupled production of 4-HB, 4-HBal, 4-HBCoA, BDO or putrescine. Product production can be, for example, obligatorily linked to the exponential growth phase of the microorganism by genetically altering the metabolic pathways of the cell, as disclosed herein. The genetic alterations can increase the production of the desired product or even make the desired product an obligatory product during the growth phase. Sets of metabolic alterations or transformations that result in increased production and elevated levels of 4-HB, 4-HBal, 4-HBCoA, BDO or putrescine biosynthesis are described herein. Each alteration within a set corresponds to the requisite metabolic reaction that should be functionally disrupted. Functional disruption of all reactions within each set can result in the increased production of 4-HB, 4-HBal, 4-HBCoA, BDO or putrescine by the engineered strain during the growth phase.

[0383] A number of metabolic modifications that include gene disruptions are described herein. It is understood by those skilled in the art that one or more of the metabolic modifications, including gene disruptions, can be combined to increase 4-HB, 4-HBal, 4-HBCoA, BDO or putrescine or otherwise improve characteristics of the microorganisms of the invention. Each of these non-naturally occurring alterations can result in increased production and an enhanced level of 4-HB, 4-HBal, 4-HBCoA, BDO or putrescine production, for example, during the exponential growth phase of the microbial organism, or otherwise improve the growth or production characteristics of the microorganisms producing 4-HB, 4-HBal, 4-HBCoA, BDO or putrescine compared to a strain that does not contain such metabolic alterations, under appropriate culture conditions. Appropriate conditions include, for example, those disclosed herein, including conditions such as particular carbon sources or reactant availabilities and/or adaptive evolution.

[0384] Given the teachings and guidance provided herein, those skilled in the art will understand that to introduce a metabolic alteration such as disruption or attenuation of an enzyme or enzymatic reaction, it can be necessary to disrupt the catalytic activity of the one or more enzymes involved in the reaction. Alternatively, a metabolic alteration can include disruption of expression of a regulatory protein or cofactor necessary for enzyme activity or maximal activity. Furthermore, genetic loss of a cofactor necessary for an enzymatic reaction can also have the same effect as a disruption of the gene encoding the enzyme. Disruption can occur by a variety of methods including, for example, deletion of an encoding gene or incorporation of a genetic alteration in one or more of the encoding gene sequences. The encoding genes targeted for disruption can be one, some, or all of the genes encoding enzymes involved in the catalytic activity. For example, where a single enzyme is involved in a targeted catalytic activity, disruption can occur by a genetic alteration that reduces or eliminates the catalytic activity of the encoded gene product. Similarly, where the single enzyme is multimeric, including heteromeric, disruption can occur by a genetic alteration that reduces or destroys the function of one or all subunits of the encoded gene products. Destruction of activity can be accomplished by loss of the binding activity of one or more subunits required to form an active complex, by destruction of the catalytic subunit of the multimeric complex or by both. Other functions of multimeric protein association and activity also can be targeted in order to disrupt a metabolic reaction of the invention. Such other functions are well known to those skilled in the art. Similarly, a target enzyme activity can be reduced or eliminated by disrupting expression of a protein or enzyme that modifies and/or activates the target enzyme, for example, a molecule required to convert an apoenzyme to a holoenzyme. Further, some or all of the functions of a single polypeptide or multimeric complex can be disrupted according to the invention in order to reduce or abolish the catalytic activity of one or more enzymes involved in a reaction or metabolic modification of the invention. Similarly, some or all of enzymes involved in a reaction or metabolic modification of the invention can be disrupted so long as the targeted reaction is reduced or eliminated.

[0385] Given the teachings and guidance provided herein, those skilled in the art also will understand that an enzymatic reaction can be disrupted by reducing or eliminating reactions encoded by a common gene and/or by one or more orthologs of that gene exhibiting similar or substantially the same activity. Reduction of both the common gene and all orthologs can lead to complete abolishment of any catalytic activity of a targeted reaction. However, disruption of either the common gene or one or more orthologs can lead to a reduction in the catalytic activity of the targeted reaction sufficient to promote coupling of growth to product biosynthesis. Exemplified herein are both the common genes encoding catalytic activities for a variety of metabolic modifications as well as their orthologs. Those skilled in the art will understand that disruption of some or all of the genes encoding a enzyme of a targeted metabolic reaction can be practiced in the methods of the invention and incorporated into the non-naturally occurring microbial organisms of the invention in order to achieve the increased production of 4-HB, 4-HBal, 4-HBCoA, BDO or putrescine or growth-coupled product production.

[0386] Given the teachings and guidance provided herein, those skilled in the art also will understand that enzymatic activity or expression can be attenuated using well known methods. Reduction of the activity or amount of an enzyme can mimic complete disruption of a gene if the reduction causes activity of the enzyme to fall below a critical level that is normally required for a pathway to function. Reduction of enzymatic activity by various techniques rather than use of gene disruption can be important for an organism's viability. Methods of reducing enzymatic activity that result in similar or identical effects of a gene disruption include, but are not limited to: reducing gene transcription or translation; destabilizing mRNA, protein or catalytic RNA; and mutating a gene that affects enzyme activity or kinetics (see Sambrook et al., Molecular Cloning: A Laboratory Manual, Third Ed., Cold Spring Harbor Laboratory, New York (2001); and Ausubel et al., Current Protocols in Molecular Biology, John Wiley and Sons, Baltimore, Md. (1999). Natural or imposed regulatory controls can also accomplish enzyme attenuation including: promoter replacement (see Wang et al., Mol. Biotechnol. 52(2):300-308 (2012)); loss or alteration of transcription factors (Dietrick et al., Annu. Rev. Biochem. 79:563-590 (2010); and Simicevic et al., Mol. Biosyst. 6(3):462-468 (2010)); introduction of inhibitory RNAs or peptides such as siRNA, antisense RNA, RNA or peptide/small-molecule binding aptamers, ribozymes, aptazymes and riboswitches (Wieland et al., Methods 56(3):351-357 (2012); O'Sullivan, Anal. Bioanal. Chem. 372(1):44-48 (2002); and Lee et al., Curr. Opin. Biotechnol. 14(5):505-511(2003)); and addition of drugs or other chemicals that reduce or disrupt enzymatic activity such as splicing an enzyme inhibitor, an antibiotic or a target-specific drug.

[0387] One skilled in the art will also understand and recognize that attenuation of an enzyme can be done at various levels. For example, at the gene level, a mutation causing a partial or complete null phenotype, such as a gene disruption or a mutation causing epistatic genetic effects that mask the activity of a gene product (Miko, Nature Education 1(1) (2008)) can be used to attenuate an enzyme. At the gene expression level, methods for attenuation include: coupling transcription to an endogenous or exogenous inducer such as isopropylthio-β-galactoside (IPTG), then adding low amounts of inducer or no inducer during the production phase (Donovan et al., J. Ind. Microbiol. 16(3):145-154 (1996); and Hansen et al., Curr. Microbiol. 36(6):341-347 (1998)); introducing or modifying a positive or a negative regulator of a gene; modify histone acetylation/deacetylation in a eukaryotic chromosomal region where a gene is integrated (Yang et al., Curr. Opin. Genet. Dev. 13(2):143-153 (2003) and Kurdistani et al., Nat. Rev. Mol. Cell Biol. 4(4):276-284 (2003)); introducing a transposition to disrupt a promoter or a regulatory gene (Bleykasten-Brosshans et al., C. R. Biol. 33(8-9):679-686 (2011); and McCue et al., PLoS Genet. 8(2):e1002474 (2012)); flipping the orientation of a transposable element or promoter region so as to modulate gene expression of an adjacent gene (Wang et al., Genetics 120(4):875-885 (1988); Hayes, Annu. Rev. Genet. 37:3-29 (2003); in a diploid organism, deleting one allele resulting in loss of heterozygosity (Daigaku et al., Mutation Research/Fundamental and Molecular Mechanisms of Mutagenesis 600(1-2)177-183 (2006)); introducing nucleic acids that increase RNA degradation (Houseley et al., Cell 136(4):763-776 (2009)); or in bacteria, for example, introduction of a transfer-messenger RNA (tmRNA) tag, which can lead to RNA degradation and ribosomal stalling (Sunohara et al., RNA 10(3):378-386 (2004); and Sunohara et al., J. Biol. Chem. 279:15368-15375 (2004)). At the translational level, attenuation can include: introducing rare codons to limit translation (Angov, Biotechnol. J. 6(6):650-659 (2011)); introducing RNA interference molecules that block translation (Castel et al., Nat. Rev. Genet. 14(2):100-112 (2013); and Kawasaki et al., Curr. Opin. Mol. Ther. 7(2):125-131(2005)); modifying regions outside the coding sequence, such as introducing secondary structure into an untranslated region (UTR) to block translation or reduce efficiency of translation (Ringnér et al., PLoS Comput. Biol. 1(7):e72 (2005)); adding RNAase sites for rapid transcript degradation (Pasquinelli, Nat. Rev. Genet. 13(4):271-282 (2012); and Arraiano et al., FEMS Microbiol. Rev. 34(5):883-932 (2010)); introducing antisense RNA oligomers or antisense transcripts (Nashizawa et al., Front. Biosci. 17:938-958 (2012)); introducing RNA or peptide aptamers, ribozymes, aptazymes, riboswitches (Wieland et al., Methods 56(3):351-357 (2012); O'Sullivan, Anal. Bioanal. Chem. 372(1):44-48 (2002); and Lee et al., Curr. Opin. Biotechnol. 14(5):505-511 (2003)); or introducing translational regulatory elements involving RNA structure that can prevent or reduce translation that can be controlled by the presence or absence of small molecules (Araujo et al., Comparative and Functional Genomics, Article ID 475731, 8 pages (2012)). At the level of enzyme localization and/or longevity, enzyme attenuation can include: adding a degradation tag for faster protein turnover (Hochstrasser, Annual Rev. Genet. 30:405-439 (1996); and Yuan et al., PLoS One 8(4):e62529 (2013)); or adding a localization tag that results in the enzyme being secreted or localized to a subcellular compartment in a eukaryotic cell where the enzyme would not be able to react with its normal substrate (Nakai et al. Genomics 14(4):897-911(1992); and Russell et al., J. Bact. 189(21)7581-7585 (2007)). At the level of post-translational regulation, enzyme attenuation can include: increasing intracellular concentration of known inhibitors; or modifying post-translational modified sites (Mann et al., Nature Biotech. 21:255-261(2003)). At the level of enzyme activity, enzyme attenuation can include: adding an endogenous or an exogenous inhibitor, such as an enzyme inhibitor, an antibiobic, or a target-specific drug, to reduce enzyme activity; limiting availability of essential cofactors, such as vitamin B12, for an enzyme that requires the cofactor; chelating a metal ion that is required for enzyme activity; or introducing a dominant negative mutation. The applicability of a technique for attenuation described above can depend upon whether a given host microbial organism is prokaryotic or eukaryotic, and it is understand that a determination of what is the appropriate technique for a given host can be readily made by one skilled in the art.

[0388] In some embodiments, microaerobic designs can be used based on the growth-coupled formation of the desired product. To examine this, production cones can be constructed for each strategy by first maximizing and, subsequently minimizing the product yields at different rates of biomass formation feasible in the network. If the rightmost boundary of all possible phenotypes of the mutant network is a single point, it implies that there is a unique optimum yield of the product at the maximum biomass formation rate possible in the network. In other cases, the rightmost boundary of the feasible phenotypes is a vertical line, indicating that at the point of maximum biomass the network can make any amount of the product in the calculated range, including the lowest amount at the bottommost point of the vertical line. Such designs are given a low priority.

[0389] The 4-HB, 4-HBal, 4-HBCoA, BDO or putrescine production strategies identified by the methods disclosed herein such as the OptKnock framework are generally ranked on the basis of their (i) theoretical yields, and optionally (ii) growth-coupled 4-HB, 4-HBal, 4-HBCoA, BDO or putrescine formation characteristics.

[0390] Accordingly, the invention also provides a non-naturally occurring microbial organism having a set of metabolic modifications that increase the yield of 4-HB, 4-HBal, 4-HBCoA, BDO or putrescine, optionally coupling 4-HB, 4-HBal, 4-HBCoA, BDO or putrescine production to growth of the organism, or otherwise improve characteristics of the microorganisms producing 4-HB, 4-HBal, 4-HBCoA, BDO or putrescine, where the set of metabolic modifications includes disruption of one or more genes, as described herein.

[0391] Each of the strains can be supplemented with additional deletions if it is determined that the strain designs do not sufficiently increase the production of 4-HB, 4-HBal, 4-HBCoA, BDO or putrescine and/or couple the formation of the product with biomass formation. Alternatively, some other enzymes not known to possess significant activity under the growth conditions can become active due to adaptive evolution or random mutagenesis. Such activities can also be knocked out. However, the list of gene deletion sets disclosed herein allows the construction of strains exhibiting high-yield production of 4-HB, 4-HBal, 4-HBCoA, BDO or putrescine, including growth-coupled production of 4-HB, 4-HBal, 4-HBCoA, BDO or putrescine.

[0392] 4-HB, 4-HBal, 4-HBCoA, BDO or putrescine can be harvested or isolated at any time point during the culturing of the microbial organism, for example, in a continuous and/or near-continuous culture period, as disclosed herein. Generally, the longer the microorganisms are maintained in a continuous and/or near-continuous growth phase, the proportionally greater amount of 4-HB, 4-HBal, 4-HBCoA, BDO or putrescine can be produced.

[0393] Therefore, the invention additionally provides a method for producing 4-HB, 4-HBal, 4-HBCoA, BDO or putrescine that includes culturing a non-naturally occurring microbial organism having one or more gene disruptions, as disclosed herein. The disruptions can occur in one or more genes encoding an enzyme that increases production of 4-HB, 4-HBal, 4-HBCoA, BDO or putrescine, including optionally coupling 4-HB, 4-HBal, 4-HBCoA, BDO or putrescine production to growth of the microorganism when the gene disruption reduces or eliminates an activity of the enzyme. For example, the disruptions can confer stable growth-coupled production of 4-HB, 4-HBal, 4-HBCoA, BDO or putrescine onto the non-naturally occurring microbial organism.

[0394] In some embodiments, the gene disruption can include a complete gene deletion. In some embodiments other methods to disrupt a gene include, for example, frameshifting by omission or addition of oligonucleotides or by mutations that render the gene inoperable. One skilled in the art will recognize the advantages of gene deletions, however, because of the stability it confers to the non-naturally occurring organism from reverting to a parental phenotype in which the gene disruption has not occurred. In particular, the gene disruptions are selected from the gene sets as disclosed herein.

[0395] Once computational or other predictions are made of one or more genes sets disruption to increase production of 4-HB, 4-HBal, 4-HBCoA, BDO or putrescine, the strains can be constructed, evolved, and tested. Gene disruptions, including gene deletions, are introduced into host organism by methods well known in the art. A particularly useful method for gene disruption is by homologous recombination, as disclosed herein.

[0396] The engineered strains can be characterized by measuring the growth rate, the substrate uptake rate, and/or the product/byproduct secretion rate. Cultures can be grown and used as inoculum for a fresh batch culture for which measurements are taken during exponential growth. The growth rate can be determined by measuring optical density using a spectrophotometer (A600). Concentrations of glucose and other organic acid byproducts in the culture supernatant can be determined by well known methods such as HPLC, GC-MS or other well known analytical methods suitable for the analysis of the desired product, as disclosed herein, and used to calculate uptake and secretion rates.

[0397] Strains containing gene disruptions can exhibit suboptimal growth rates until their metabolic networks have adjusted to their missing functionalities. To assist in this adjustment, the strains can be adaptively evolved. By subjecting the strains to adaptive evolution, cellular growth rate becomes the primary selection pressure and the mutant cells are compelled to reallocate their metabolic fluxes in order to enhance their rates of growth. This reprogramming of metabolism has been recently demonstrated for several E. coli mutants that had been adaptively evolved on various substrates to reach the growth rates predicted a priori by an in silico model (Fong and Palsson, Nat. Genet. 36:1056-1058 (2004)). The growth improvements brought about by adaptive evolution can be accompanied by enhanced rates of 4-HB, 4-HBal, 4-HBCoA, BDO or putrescine production. The strains can optionally be adaptively evolved in replicate, running in parallel, to account for differences in the evolutionary patterns that can be exhibited by a host organism (Fong and Palsson, Nat. Genet. 36:1056-1058 (2004); Fong et al., J. Bacteriol. 185:6400-6408 (2003); Ibarra et al., Nature 420:186-189 (2002)) that could potentially result in one strain having superior production qualities over the others. Evolutions can be run for a period of time, typically 2-6 weeks, depending upon the rate of growth improvement attained. In general, evolutions are stopped once a stable phenotype is obtained.

[0398] Following the adaptive evolution process, the new strains are characterized again by measuring the growth rate, the substrate uptake rate, and the product/byproduct secretion rate. These results are compared to the theoretical predictions by plotting actual growth and production yields along side the production envelopes from metabolic modeling. The most successful design/evolution combinations are chosen to pursue further, and are characterized in lab-scale batch and continuous fermentations. The growth-coupled biochemical production concept behind the methods disclosed herein such as OptKnock approach should also result in the generation of genetically stable overproducers. Thus, the cultures are maintained in continuous mode for an extended period of time, for example, one month or more, to evaluate long-term stability. Periodic samples can be taken to ensure that yield and productivity are maintained.

[0399] Adaptive evolution is a powerful technique that can be used to increase growth rates of mutant or engineered microbial strains, or of wild-type strains growing under unnatural environmental conditions. It is especially useful for strains designed via methods such as OptKnock, which results in growth-coupled product formation. Therefore, evolution toward optimal growing strains will indirectly optimize production as well. Unique strains of E. coli K-12 MG1655 were created through gene knockouts and adaptive evolution. (Fong and Palsson, Nat. Genet. 36:1056-1058 (2004)). In this work, all adaptive evolutionary cultures were maintained in prolonged exponential growth by serial passage of batch cultures into fresh medium before the stationary phase was reached, thus rendering growth rate as the primary selection pressure. Knockout strains were constructed and evolved on minimal medium supplemented with different carbon substrates (four for each knockout strain). Evolution cultures were carried out in duplicate or triplicate, giving a total of 50 evolution knockout strains. The evolution cultures were maintained in exponential growth until a stable growth rate was reached. The computational predictions were accurate (within 10%) at predicting the post-evolution growth rate of the knockout strains in 38 out of the 50 cases examined. Furthermore, a combination of OptKnock design with adaptive evolution has led to improved lactic acid production strains. (Fong et al., Biotechnol. Bioeng. 91:643-648 (2005)). Similar methods can be applied to the strains disclosed herein and applied to various host strains.

[0400] There are a number of developed technologies for carrying out adaptive evolution. Exemplary methods are disclosed herein. In some embodiments, optimization of a non-naturally occurring organism of the present invention includes utilizing adaptive evolution techniques to increase 4-HB, 4-HBal, 4-HBCoA, BDO or putrescine production and/or stability of the producing strain.

[0401] Serial culture involves repetitive transfer of a small volume of grown culture to a much larger vessel containing fresh growth medium. When the cultured organisms have grown to saturation in the new vessel, the process is repeated. This method has been used to achieve the longest demonstrations of sustained culture in the literature (Lenski and Travisano, Proc. Natl. Acad. Sci. USA 91:6808-6814 (1994)) in experiments which clearly demonstrated consistent improvement in reproductive rate over a period of years. Typically, transfer of cultures is usually performed during exponential phase, so each day the transfer volume is precisely calculated to maintain exponential growth through the next 24 hour period. Manual serial dilution is inexpensive and easy to parallelize.

[0402] In continuous culture the growth of cells in a chemostat represents an extreme case of dilution in which a very high fraction of the cell population remains. As a culture grows and becomes saturated, a small proportion of the grown culture is replaced with fresh media, allowing the culture to continually grow at close to its maximum population size. Chemostats have been used to demonstrate short periods of rapid improvement in reproductive rate (Dykhuizen, Methods Enzymol. 613-631 (1993)). The potential usefulness of these devices was recognized, but traditional chemostats were unable to sustain long periods of selection for increased reproduction rate, due to the unintended selection of dilution-resistant (static) variants. These variants are able to resist dilution by adhering to the surface of the chemostat, and by doing so, outcompete less adherent individuals, including those that have higher reproductive rates, thus obviating the intended purpose of the device (Chao and Ramsdell, J. Gen. Microbiol 20:132-138 (1985)). One possible way to overcome this drawback is the implementation of a device with two growth chambers, which periodically undergo transient phases of sterilization, as described previously (Marliere and Mutzel, U.S. Pat. No. 6,686,194).

[0403] Evolugator™ is a continuous culture device developed by Evolugate, LLC (Gainesville, Fla.) and exhibits significant time and effort savings over traditional evolution techniques (de Crecy et al., Appl. Microbiol. Biotechnol. 77:489-496 (2007)). The cells are maintained in prolonged exponential growth by the serial passage of batch cultures into fresh medium before the stationary phase is attained. By automating optical density measurement and liquid handling, the Evolugator can perform serial transfer at high rates using large culture volumes, thus approaching the efficiency of a chemostat in evolution of cell fitness. For example, a mutant of Acinetobacter sp ADP1 deficient in a component of the translation apparatus, and having severely hampered growth, was evolved in 200 generations to 80% of the wild-type growth rate. However, in contrast to the chemostat which maintains cells in a single vessel, the machine operates by moving from one “reactor” to the next in subdivided regions of a spool of tubing, thus eliminating any selection for wall-growth. The transfer volume is adjustable, and normally set to about 50%. A drawback to this device is that it is large and costly, thus running large numbers of evolutions in parallel is not practical. Furthermore, gas addition is not well regulated, and strict anaerobic conditions are not maintained with the current device configuration. Nevertheless, this is an alternative method to adaptively evolve a production strain.

[0404] As disclosed herein, a nucleic acid encoding a desired activity of a 4-HB, 4-HBal, 4-HBCoA, BDO or putrescine pathway can be introduced into a host organism. In some cases, it can be desirable to modify an activity of a 4-HB, 4-HBal, 4-HBCoA BDO or putrescine pathway enzyme or protein to increase production of 4-HB, 4-HBal, 4-HBCoA BDO or putrescine. For example, known mutations that increase the activity of a protein or enzyme can be introduced into an encoding nucleic acid molecule. Additionally, optimization methods can be applied to increase the activity of an enzyme or protein and/or decrease an inhibitory activity, for example, decrease the activity of a negative regulator.

[0405] One such optimization method is directed evolution. Directed evolution is a powerful approach that involves the introduction of mutations targeted to a specific gene in order to improve and/or alter the properties of an enzyme. Improved and/or altered enzymes can be identified through the development and implementation of sensitive high-throughput screening assays that allow the automated screening of many enzyme variants (for example, >10⁴). Iterative rounds of mutagenesis and screening typically are performed to afford an enzyme with optimized properties. Computational algorithms that can help to identify areas of the gene for mutagenesis also have been developed and can significantly reduce the number of enzyme variants that need to be generated and screened. Numerous directed evolution technologies have been developed (for reviews, see Hibbert et al., Biomol. Eng 22:11-19 (2005); Huisman and Lalonde, In Biocatalysis in the pharmaceutical and biotechnology industries pgs. 717-742 (2007), Patel (ed.), CRC Press; Often and Quax. Biomol. Eng 22:1-9 (2005)₄ and Sen et al., Appl Biochem. Biotechnol 143:212-223 (2007)) to be effective at creating diverse variant libraries, and these methods have been successfully applied to the improvement of a wide range of properties across many enzyme classes. Enzyme characteristics that have been improved and/or altered by directed evolution technologies include, for example: selectivity/specificity, for conversion of non-natural substrates; temperature stability, for robust high temperature processing; pH stability, for bioprocessing under lower or higher pH conditions; substrate or product tolerance, so that high product titers can be achieved; binding (Kₘ), including broadening substrate binding to include non-natural substrates; inhibition (Kᵢ), to remove inhibition by products, substrates, or key intermediates; activity (kcat), to increases enzymatic reaction rates to achieve desired flux; expression levels, to increase protein yields and overall pathway flux; oxygen stability, for operation of air sensitive enzymes under aerobic conditions; and anaerobic activity, for operation of an aerobic enzyme in the absence of oxygen.

[0406] A number of exemplary methods have been developed for the mutagenesis and diversification of genes to target desired properties of specific enzymes. Such methods are well known to those skilled in the art. Any of these can be used to alter and/or optimize the activity of a 4-HB, 4-HBal, 4-HBCoA, BDO or putrescine pathway enzyme or protein. Such methods include, but are not limited to EpPCR, which introduces random point mutations by reducing the fidelity of DNA polymerase in PCR reactions (Pritchard et al., J Theor. Biol. 234:497-509 (2005)); Error-prone Rolling Circle Amplification (epRCA), which is similar to epPCR except a whole circular plasmid is used as the template and random 6-mers with exonuclease resistant thiophosphate linkages on the last 2 nucleotides are used to amplify the plasmid followed by transformation into cells in which the plasmid is re-circularized at tandem repeats (Fujii et al., Nucleic Acids Res. 32:e145 (2004); and Fujii et al., Nat. Protoc. 1:2493-2497 (2006)); DNA or Family Shuffling, which typically involves digestion of two or more variant genes with nucleases such as Dnase I or EndoV to generate a pool of random fragments that are reassembled by cycles of annealing and extension in the presence of DNA polymerase to create a library of chimeric genes (Stemmer, Proc Natl Acad Sci USA 91:10747-10751(1994); and Stemmer, Nature 370:389-391(1994)); Staggered Extension (StEP), which entails template priming followed by repeated cycles of 2 step PCR with denaturation and very short duration of annealing/extension (as short as 5 sec) (Zhao et al., Nat. Biotechnol. 16:258-261 (1998)); Random Priming Recombination (RPR), in which random sequence primers are used to generate many short DNA fragments complementary to different segments of the template (Shao et al., Nucleic Acids Res 26:681-683 (1998)).

[0407] Additional methods include Heteroduplex Recombination, in which linearized plasmid DNA is used to form heteroduplexes that are repaired by mismatch repair (Volkov et al, Nucleic Acids Res. 27:e18 (1999); and Volkov et al., Methods Enzymol. 328:456-463 (2000)); Random Chimeragenesis on Transient Templates (RACHITT), which employs Dnase I fragmentation and size fractionation of single stranded DNA (ssDNA) (Coco et al., Nat. Biotechnol. 19:354-359 (2001)); Recombined Extension on Truncated templates (REIT), which entails template switching of unidirectionally growing strands from primers in the presence of unidirectional ssDNA fragments used as a pool of templates (Lee et al., J. Molec. Catalysis 26:119-129 (2003)); Degenerate Oligonucleotide Gene Shuffling (DOGS), in which degenerate primers are used to control recombination between molecules; (Bergquist and Gibbs, Methods Mol. Biol 352:191-204 (2007); Bergquist et al., Biomol. Eng 22:63-72 (2005); Gibbs et al., Gene 271:13-20 (2001)); Incremental Truncation for the Creation of Hybrid Enzymes (ITCHY), which creates a combinatorial library with 1 base pair deletions of a gene or gene fragment of interest (Ostermeier et al., Proc. Natl. Acad. Sci. USA 96:3562-3567 (1999); and Ostermeier et al., Nat. Biotechnol. 17:1205-1209 (1999)); Thio-Incremental Truncation for the Creation of Hybrid Enzymes (THIO-ITCHY), which is similar to ITCHY except that phosphothioate dNTPs are used to generate truncations (Lutz et al., Nucleic Acids Res 29:E16 (2001)); SCRATCHY, which combines two methods for recombining genes, ITCHY and DNA shuffling (Lutz et al., Proc. Natl. Acad. Sci. USA 98:11248-11253 (2001)); Random Drift Mutagenesis (RNDM), in which mutations made via epPCR are followed by screening/selection for those retaining usable activity (Bergquist et al., Biomol. Eng. 22:63-72 (2005)); Sequence Saturation Mutagenesis (SeSaM), a random mutagenesis method that generates a pool of random length fragments using random incorporation of a phosphothioate nucleotide and cleavage, which is used as a template to extend in the presence of “universal” bases such as inosine, and replication of an inosine-containing complement gives random base incorporation and, consequently, mutagenesis (Wong et al., Biotechnol. J. 3:74-82 (2008); Wong et al., Nucleic Acids Res. 32:e26 (2004); and Wong et al., Anal. Biochem. 341:187-189 (2005)); Synthetic Shuffling, which uses overlapping oligonucleotides designed to encode “all genetic diversity in targets” and allows a very high diversity for the shuffled progeny (Ness et al., Nat. Biotechnol. 20:1251-1255 (2002)); Nucleotide Exchange and Excision Technology NexT, which exploits a combination of dUTP incorporation followed by treatment with uracil DNA glycosylase and then piperidine to perform endpoint DNA fragmentation (Muller et al., Nucleic Acids Res. 33:e117 (2005)).

[0408] Further methods include Sequence Homology-Independent Protein Recombination (SHIPREC), in which a linker is used to facilitate fusion between two distantly related or unrelated genes, and a range of chimeras is generated between the two genes, resulting in libraries of single-crossover hybrids (Sieber et al., Nat. Biotechnol. 19:456-460 (2001)); Gene Site Saturation Mutagenesis™ (GSSM™), in which the starting materials include a supercoiled double stranded DNA (dsDNA) plasmid containing an insert and two primers which are degenerate at the desired site of mutations (Kretz et al., Methods Enzymol. 388:3-11(2004)); Combinatorial Cassette Mutagenesis (CCM), which involves the use of short oligonucleotide cassettes to replace limited regions with a large number of possible amino acid sequence alterations (Reidhaar-Olson et al. Methods Enzymol. 208:564-586 (1991); and Reidhaar-Olson et al. Science 241:53-57 (1988)); Combinatorial Multiple Cassette Mutagenesis (CMCM), which is essentially similar to CCM and uses epPCR at high mutation rate to identify hot spots and hot regions and then extension by CMCM to cover a defined region of protein sequence space (Reetz et al., Angew. Chem. Int. Ed Engl. 40:3589-3591 (2001)); the Mutator Strains technique, in which conditional is mutator plasmids, utilizing the mutD5 gene, which encodes a mutant subunit of DNA polymerase BI, to allow increases of 20 to 4000-X in random and natural mutation frequency during selection and block accumulation of deleterious mutations when selection is not required (Selifonova et al., Appl. Environ. Microbiol. 67:3645-3649 (2001)); Low et al., J. Mol. Biol. 260:359-3680 (1996)).

[0409] Additional exemplary methods include Look-Through Mutagenesis (LTM), which is a multidimensional mutagenesis method that assesses and optimizes combinatorial mutations of selected amino acids (Rajpal et al., Proc. Natl. Acad. Sci. USA 102:8466-8471(2005)); Gene Reassembly, which is a DNA shuffling method that can be applied to multiple genes at one time or to create a large library of chimeras (multiple mutations) of a single gene (Tunable GeneReassembly™ (TGR™) Technology supplied by Verenium Corporation), in Silico Protein Design Automation (PDA), which is an optimization algorithm that anchors the structurally defined protein backbone possessing a particular fold, and searches sequence space for amino acid substitutions that can stabilize the fold and overall protein energetics, and generally works most effectively on proteins with known three-dimensional structures (Hayes et al., Proc. Natl. Acad. Sci. USA 99:15926-15931 (2002)); and Iterative Saturation Mutagenesis (ISM), which involves using knowledge of structure/function to choose a likely site for enzyme improvement, performing saturation mutagenesis at chosen site using a mutagenesis method such as Stratagene QuikChange (Stratagene; San Diego Calif.), screening/selecting for desired properties, and, using improved clone(s), starting over at another site and continue repeating until a desired activity is achieved (Reetz et al., Nat. Protoc. 2:891-903 (2007); and Reetz et al., Angew. Chem. Int. Ed Engl. 45:7745-7751(2006)).

[0410] Any of the aforementioned methods for mutagenesis can be used alone or in any combination. Additionally, any one or combination of the directed evolution methods can be used in conjunction with adaptive evolution techniques, as described herein.

[0411] As disclosed herein, esterases were utilized to convert gamma-butyrolactone to 4-hydroxybutyrate. Exemplary esterases include, but are not limited to, esterases from Yersinia intermedia 29909 (locus yinte0001_{—}13710) and Agrobacterium tumefaciens str. C58 (Culler et al., Mol. Plant Microbe Interact. 17(9):951-957 (2004))(see Example XXXIV). The nucleotide sequence and amino acid sequence of the Yersinia gene (locus yinte0001_{—}13710) is shown in FIG. 89 (see also GenBank ZP_{—}04636075.1; GI:238792441). The nucleotide and amino acid sequence of the gene from Agrobacterium tumefaciens is shown in FIG. 90. Additionally exemplary esterases include AttM of Escherichia coli KTE10 (GenBank ZP_{—}19612688.1, GI:432369596) and attM of Photorhabdus asymbiotica (GenBank YP_{—}003039319.1 GI:253987963).

[0412] The invention additionally provides a method for reducing gamma-butyrolactone production in a cell or cell culture by expressing in the cell a gamma-butyrolactone esterase. The gamma-butyrolactone esterase can be, for example, a gamma-butyrolactone esterase of Yersinia or a polypeptide having at least 90% identity to a gamma-butyrolactone esterase of Yersinia. In a particular embodiment, the gamma-butyrolactone esterase is encoded by a nucleic acid encoding the amino acid sequence of SEQ ID NO:, or a nucleic acid encoding a polypeptide having at least 90% identity to SEQ ID NO:. The invention further provides utilizing a gamma-butyrolactone esterase to decrease the amount of gamma-butyrolactone in a sample in vitro.

[0413] In some embodiments, the invention provides an isolated nucleic acid molecule selected from: (a) a nucleic acid molecule encoding an amino acid sequence disclosed herein, such as those referenced in Tables 53, 55 or 57 or Example XXXXIII, wherein the amino acid sequence comprises one or more variant amino acid positions disclosed herein, such as those set forth in Tables 54, 56 or 58 or Example XXXXIII; (b) a nucleic acid molecule that hybridizes to the nucleic acid of (a) under highly stringent hybridization conditions and comprises a nucleic acid sequence that encodes one or more variant amino acid positions disclosed herein, such as those set forth in Tables 54, 56 or 58 or Example XXXXIII; and a nucleic acid molecule that is complementary to (a) or (b). In some aspects, the isolated nucleic acid molecule can have at least 65%, 70%, 75%, 80%, 85%, 90%, 91%, 92%, 93%, 94%, 95%, 96%, 97%, 98%, or 99% sequence identity, or is identical (100% identity), to an amino acids sequence disclosed herein, such as those referenced in Tables 53, 55 or 57 or Example XXXXIII.

[0414] It is understood that a nucleic acid of the invention can exclude a wild type parental sequence, for example a parental sequence as disclosed in any of Tables 53-58. One skilled in the art will readily understand the meaning of a parental wild type sequence based on what is well known in the art. It is further understood that such a nucleic acid can exclude a naturally occurring amino acid sequence as found in nature. Thus, in a particular embodiment, the nucleic acid of the invention is as set forth above and herein, with the proviso that the encoded amino acid sequence is not the wild type parental sequence or a naturally occurring amino acid sequence and/or that the nucleic acid sequence is not a wild type or naturally occurring nucleic acid sequence. A naturally occurring amino acid or nucleic acid sequence is understood by those skilled in the art as relating to a sequence that is found in a naturally occurring organism. Thus, a nucleic acid or amino acid sequence that is not found in the same state or having the same nucleotide or encoded amino acid sequence as in a naturally occurring organism is included within the meaning of a nucleic acid and/or amino acid sequence of the invention. For example, a nucleic acid or amino acid sequence that has been altered at one or more nucleotide or amino acid positions from a parent sequence, including variants as described herein (Tables 53-58 and Example XXXXIII), are included within the meaning of a nucleic acid or amino acid sequence of the invention that is not naturally occurring. An isolated nucleic acid molecule of the invention excludes a naturally occurring chromosome that contains the nucleic acid sequence, and can further exclude other molecules as found in a naturally occurring cell such as DNA binding proteins, for example, proteins such as histones that bind to chromosomes with a eukaryotic cell.

[0415] Thus, an isolated nucleic acid sequence of the invention has physical and chemical differences compared to a naturally occurring nucleic acid sequence. An isolated or non-naturally occurring nucleic acid of the invention does not contain or does not necessarily have some or all of the chemical bonds, either covalent or non-covalent bonds, of a naturally occurring nucleic acid sequence as found in nature. An isolated nucleic acid of the invention thus differs from a naturally occurring nucleic acid, for example, by having a different chemical structure than a naturally occurring nucleic acid sequence as found in a chromosome. A different chemical structure can occur, for example, by cleavage of phosphodiester bonds that release an isolated nucleic acid sequence from a naturally occurring chromosome. An isolated nucleic acid of the invention can also differ from a naturally occurring nucleic acid by isolating or separating the nucleic acid from proteins that bind to chromosomal DNA in either prokaryotic or eukaryotic cells, thereby differing from a naturally occurring nucleic acid by different non-covalent bonds. With respect to nucleic acids of prokaryotic origin, a non-naturally occurring nucleic acid of the invention does not necessarily have some or all of the naturally occurring chemical bonds of a chromosome, for example, binding to DNA binding proteins such as polymerases or chromosome structural proteins, or is not in a higher order structure such as being supercoiled. With respect to nucleic acids of eukarytoic origin, a non-naturally occurring nucleic acid of the invention also does not contain the same internal nucleic acid chemical bonds or chemical bonds with structural proteins as found in chromatin. For example, a non-naturally occurring nucleic acid of the invention is not chemically bonded to histones or scaffold proteins and is not contained in a centromere or telomere. Thus, the non-naturally occurring nucleic acids of the invention are chemically distinct from a naturally occurring nucleic acid because they either lack or contain different van der Waals interactions, hydrogen bonds, ionic or electrostatic bonds, and/or covalent bonds from a nucleic acid as found in nature. Such differences in bonds can occur either internally within separate regions of the nucleic acid (that is cis) or such difference in bonds can occur in trans, for example, interactions with chromosomal proteins. In the case of a nucleic acid of eukaryotic origen, a cDNA is considered to be an isolated or non-naturally occurring nucleic acid since the chemical bonds within a cDNA differ from the covlatent bonds, that is the sequence, of a gene on chromosomal DNA. Thus, it is understood by those skilled in the art that an isolated or non-naturally occurring nucleic acid is distinct from a naturally occurring nucleic acid.

[0416] A nucleic acid molecule encoding a 4-HB, GBL, 4-HBal, 4-HBCoA, BDO and/or putrescine pathway enzyme or protein of the invention can also include a nucleic acid molecule that hybridizes to a nucleic acid disclosed herein by SEQ ID NO, GenBank and/or GI number or a nucleic acid molecule that hybridizes to a nucleic acid molecule that encodes an amino acid sequence disclosed herein by SEQ ID NO, GenBank and/or GI number. Hybridization conditions can include highly stringent, moderately stringent, or low stringency hybridization conditions that are well known to one of skill in the art such as those described herein. Similarly, a nucleic acid molecule that can be used in the invention can be described as having a certain percent sequence identity to a nucleic acid disclosed herein by SEQ ID NO, GenBank and/or GI number or a nucleic acid molecule that hybridizes to a nucleic acid molecule that encodes an amino acid sequence disclosed herein by SEQ ID NO, GenBank and/or GI number. For example, the nucleic acid molecule can have at least 65%, 70%, 75%, 80%, 85%, 90%, 91%, 92%, 93%, 94%, 95%, 96%, 97%, 98% or 99% sequence identity, or is identical, to a nucleic acid described herein.

[0417] The phrase “stringent hybridization” is used herein to refer to conditions under which hybridized polynucleotides are stable. As known to those of skill in the art, the stability of hybridized polynucleotides is reflected in the melting temperature (Tₘ) of the hybrids. In general, the stability of a polynucleotide hybrid is a function of the salt concentration, for example, sodium ion concentration and temperature. A hybridization reaction can be performed under conditions of lower stringency, followed by washes of varying, but higher, stringency. Reference to hybridization stringency relates to such washing conditions.

[0418] The phrase “highly stringent hybridization” refers to conditions that permit hybridization of only those nucleic acid sequences that form stable hybridized polynucleotides in 0.018M NaCl at 65° C., for example, if a hybrid is not stable in 0.018M NaCl at 65° C., it will not be stable under high stringency conditions, as contemplated herein. High stringency conditions can be provided, for example, by hybridization in 50% formamide, 5×Denhart's solution, 5×SSPE, 0.2% SDS at 42° C., followed by washing in 0.1×SSPE, and 0.1% SDS at 65° C.

[0419] Hybridization conditions other than highly stringent hybridization conditions can be used to describe the nucleic acid sequences disclosed herein. For example, the phrase moderately stringent hybridization refers to conditions equivalent to hybridization in 50% formamide, 5×Denhart's solution, 5×SSPE, 0.2% SDS at 42° C., followed by washing in 0.2×SSPE, 0.2% SDS, at 42° C. The phrase low stringency hybridization refers to conditions equivalent to hybridization in 10% formamide, 5×Denhart's solution, 6×SSPE, 0.2% SDS at 22° C., followed by washing in 1×SSPE, 0.2% SDS, at 37° C. Denhart's solution contains 1% Ficoll, 1% polyvinylpyrolidone, and 1% bovine serum albumin (BSA). 20×SSPE (sodium chloride, sodium phosphate, ethylene diamide tetraacetic acid (EDTA)) contains 3M sodium chloride, 0.2M sodium phosphate, and 0.025 M (EDTA).

[0420] Other suitable low, moderate and high stringency hybridization buffers and conditions are well known to those of skill in the art and are described, for example, in Sambrook et al., Molecular Cloning: A Laboratory Manual, Cold Spring Harbor Laboratories, Cold Spring Harbor, N.Y., 1989; and Ausubel et al., Current Protocols in Molecular Biology, John Wiley and Sons, Baltimore, Md. (1999)). Nucleic acids encoding polypeptides of the invention that hybridize under moderately stringent or high stringency conditions to substantially the entire sequence, or a substantial portion, for example, can be at least 15-30 nucleotides of the nucleic acid sequence set forth herein.

[0421] In certain embodiments, the isolated nucleic acid molecule of the invention encodes an amino acid sequence that includes at least two, three, four, five, six, seven, eight, nine, ten, eleven, twelve, thirteen, fourteen, fifteen, sixteen, seventeen, eighteen, nineteen, twenty or more variants in any combination disclosed herein. The variants can include any combination of those set forth in Tables 54, 56 or 58 or Example XXXXIII. The variants alone or in combination can produce an enzyme that retains or improves the activity of the wild-type (native) enzyme encoded by the nucleic acid molecule. Methods of generating and assaying such variant are well known to one of skill in the art.

[0422] In certain aspects, the invention provides a nucleic acid molecule that encodes an amino acid sequence having one or more variant disclosed herein, wherein the nucleic acid molecule has at least a certain sequence identity to a nucleotide sequence disclosed herein, for example, a nucleic acid molecule encoding a 4-HB, GBL, 4-HBal, 4-HBCoA, BDO and/or putrescine pathway enzyme or protein of the invention, can have at least a certain identity to a nucleotide sequence disclosed herein. Accordingly, in some embodiments, the invention provides a nucleic acid molecule having a nucleotide sequence of at least 65% identity, at least 70% identity, at least 75% identity, at least 80% identity, at least 85% identity, at least 90% identity, at least 91% identity, at least 92% identity, at least 93% identity, at least 94% identity, at least 95% identity, at least 96% identity, at least 97% identity, at least 98% identity, or at least 99% identity, or is identical, to a nucleotide sequence disclosed herein, for example, by sequence, SEQ ID NO, GenBank and/or GI number, or a nucleic acid molecule that hybridizes to a nucleic acid molecule that encodes an amino acid sequence disclosed herein by sequence, SEQ ID NO, GenBank and/or GI number. The invention still further provides a nucleic acid molecule that encodes an amino acid sequence having one or more variant amino acid positions as disclosed herein, wherein the amino acid sequence has at least 65% identity, at least 70% identity, at least 75% identity, at least 80% identity, at least 85% identity, at least 90% identity, at least 91%, at least 92%, at least 93%, at least 94%, at least 95% identity, at least 96%, at least 97%, at least 98% identity, or at least 99% identity, or is identical, to an amino acid sequence disclosed herein. It is understood that the nucleic acids of the invention, including those with recited % identity, that encode variant polypeptides such as cat2, aldehyde dehydrogenase and alcohol dehydrogenase encode variant polypeptides that can carry out a similar enzymatic reaction as the parent polypeptide, for example, converting 4-hydroxybutyrate to 4-hydroxybutyryl-CoA, converting 4-hydroxybutyryl-CoA to 4-hydroxybutyraldehyde, or converting 4-hydroxybutyraldehyde to 1,4-butanediol, as disclosed herein (see Example XXXXIII).

[0423] Accordingly, in some aspects of the invention, a nucleic acid molecule encoding a 4-HB, GBL, 4-HBal, 4-HBCoA, BDO and/or putrescine pathway enzyme or protein has a nucleotide sequence of at least 65% identity, at least 70% identity, at least 75% identity, at least 80% identity, at least 85% identity, at least 90% identity, at least 91% identity, at least 92% identity, at least 93% identity, at least 94% identity, at least 95% identity, at least 96% identity, at least 97% identity, at least 98% identity, or at least 99% identity, or is identical, to a nucleic acid disclosed herein by SEQ ID NO, GenBank and/or GI number or a nucleic acid molecule that hybridizes to a nucleic acid molecule that encodes an amino acid sequence disclosed herein by SEQ ID NO, GenBank and/or GI number.

[0424] In some embodiments, the invention provides a vector containing a nucleic acid molecule disclosed herein. In some aspects, the vector can be an expression vector as disclosed herein.

[0425] In some embodiments, the invention provides a host cell containing a vector disclosed herein. In some aspects, the host cell can be a non-naturally occurring microbial organism having a pathway that produces 4-HB, GBL, 4-HBal, 4-HBCoA, BDO and/or putrescine. The nucleic acid molecule contained in the host cell can be expressed using methods well known to one of skill in the art, such as using a promoter and/or enhancer that allows expression of the nucleic acid molecule in a desired host cell. Any of a variety of inducible promoters or enhancers can also be included in the vector for regulated expression of a nucleic acid molecule.

[0426] In certain embodiments, the invention provides a host cell disclosed herein, wherein the nucleic acid molecule of the invention is integrated into the host chromosome. Integration of the nucleic acid molecule can be done using methods well known to one of skill in the art, such as those disclosed herein. For example, the methods used to integrate nucleic acids into a host chromosome described herein is not limited to the precise nucleic acid molecule integrated. It is understood that one of skill in the art would be able to apply these same methods for integration of desired nucleic acids at the same or alternative sites within the genome of a host cell. In some aspects, integration of the nucleic acid molecule of the invention can be site-specific. In some aspects, the site specific integration will be of a minimal amount of the nucleic acid molecule such as the coding region of the desired polypeptide, which can be expressed by an endogenous host promoter. Methods of site-specific integration are well known to those of skill in the art, any number of which can be used to generate the host cells of the invention. Alternatively, the nucleic acid molecule can be expressed in a cell where the nucleic acid molecule is not integrated into a host chromosome, for example, expressed in a cell from a plasmid or other vector, as disclosed herein.

[0427] In some embodiments, the host cell of the invention is a species of microorganism that is capable of fermentation. Exemplary microorganisms that are capable of fermentation are described herein. Furthermore, in some embodiments, the invention provides culture medium containing one or more host cells of the invention. In some aspect, the culture medium can be purified or substantially purified from a host cell of the invention following culturing of the host cell for production of 4-HB, GBL, 4-HBal, 4-HBCoA, BDO and/or putrescine. Methods of purifying or substantially purifying culture medium are well known to one skilled in the art and any one of which can be used to generate the culture medium of the invention, including those methods disclosed herein.

[0428] In some embodiments, the invention provides a host strain, a method of constructing a host strain, or a method of fermentation to produce 4-HB, GBL, 4-HBal, 4-HBCoA, BDO and/or putrescine with the host strain, wherein the host strain includes a deletion and/or modification that attenuates expression or activity of one or more, up to all, native host genes encoding a polypeptide (enzyme) that catalyzes the same reaction in a 4-HB, GBL, 4-HBal, 4-HBCoA, BDO and/or putrescine pathway disclosed herein. In some aspects, the host strain provides an improved yield of 4-HB, GBL, 4-HBal, 4-HBCoA, BDO and/or putrescine in the fermentation compared to the parent strain before the deletion and/or modification.

[0429] In some embodiments, the invention provides an isolated polypeptide having an amino acid sequence disclosed herein, such as those referenced in Tables 53, 55 or 57 or Example XXXXIII, wherein the amino acid sequence includes one or more variant amino acid positions as set forth in Tables 54, 56 or 58 or Example XXXXIII. In some aspects, the isolated polypeptide of the invention includes an amino acid sequence, other than the one or more variant amino acid positions as set forth in Tables 54, 56 or 58 or Example XXXXIII, with at least 65%, 70%, 75%, 80%, 85%, 90%, 91%, 92%, 93%, 94%, 95%, 96%, 97%, 98% or 99% sequence identity, or is identical, to an amino acids sequence referenced in Tables 54, 56 or 58 or Example XXXXIII. It is understood that a variant amino acid position can include any one of the 20 naturally occurring amino acids, a conservative substitution of a wild type or parental sequence at the corresponding position of the variant amino acid position, or a specific amino acid at the variant amino acid position such as those disclosed herein in Example XXXXIII. It is further understood that any of the variant amino acid positions can be combined to generate further variants. Variants with combinations of two or more variant amino acid positions exhibited activities greater than wild type (see Example XXXXIII). Thus, as exemplified herein, generating enzyme variants by combining active variant amino acid positions resulted in enzyme variants with improved properties (see Example XXXXIII). One skilled in the art can readily generate polypeptides with single variant positions or combinations of variant positions using methods well known to those skilled in the art to generate polypeptides with desired properties, including increased enzyme activity and/or stability.

[0430] “Homology” or “identity” or “similarity” refers to sequence similarity between two polypeptides or between two nucleic acid molecules. Homology can be determined by comparing a position in each sequence which may be aligned for purposes of comparison. When a position in the compared sequence is occupied by the same base or amino acid, then the molecules are homologous at that position. A degree of homology between sequences is a function of the number of matching or homologous positions shared by the sequences.

[0431] A polypeptide or polypeptide region (or a polynucleotide or polynucleotide region) has a certain percentage (for example, 65%, 70%, 75%, 80%, 85%, 90%, 95%, 98% or 99%) of “sequence identity” to another sequence means that, when aligned, that percentage of amino acids (or nucleotide bases) are the same in comparing the two sequences. Sequence identity (also known as homology or similarity) refers to sequence similarity between two nucleic acid molecules or between two polypeptides. Identity can be determined by comparing a position in each sequence, which may be aligned for purposes of comparison. When a position in the compared sequence is occupied by the same base or amino acid, then the molecules are identical at that position. A degree of identity between sequences is a function of the number of matching or homologous positions shared by the sequences. This alignment and the percent homology or sequence identity can be determined using software programs known in the art, for example those described in Ausubel et al., supra. Preferably, default parameters are used for alignment. One alignment program is BLAST, using default parameters. In particular, programs are BLASTN and BLASTP, using the following default parameters: Genetic code=standard; filter=none; strand=both; cutoff=60; expect=10; Matrix=BLOSUM62; Descriptions=50 sequences; sort by=HIGH SCORE; Databases=non-redundant, GenBank+EMBL+DDBJ+PDB+GenBank CDS translations+SwissProtein+SPupdate+PIR Details of these programs can be found at the National Center for Biotechnology Information (NCBI).

[0432] In certain embodiments, the invention provides an isolated polypeptide having an amino acid sequence that includes at least two, three, four, five, six, seven, eight, nine, ten, eleven, twelve, thirteen, fourteen, fifteen, sixteen, seventeen, eighteen, nineteen, twenty or more variants in any combination disclosed herein. The variants can include any combination of the variants set forth in Tables 54, 56 or 58 or Example XXXXIII. The variants alone or in combination can produce an enzyme that retains or improves the activity of the wild-type (native) enzyme encoded by the nucleic acid molecule. In some aspects, the polypeptide of the invention having any combination of variants set forth in Table 54 or Example XXXXIII (4-hydroxybutyrate coenzyme A transferase; cat 2) can convert 4-hydroxybutyrate to 4-hydroxybutyryl-CoA. In some aspects, the polypeptide of the invention having any combination of variants set forth in Table 58 or Example XXXXIII aldehyde dehydrogenase) can convert 4-hydroxybutyryl-CoA to 4-hydroxybutyraldehyde. In some aspects, the polypeptide of the invention having any combination of variants set forth in Table 56 or Example XXXXIII (alcohol dehydrogenase) can convert 4-hydroxybutyraldehyde to 1,4-butanediol. Methods of generating and assaying such polypeptides are well known to one of skill in the art.

[0433] In some embodiments, the isolated polypeptide of the invention can further include a conservative amino acid substitution in from 1 to 100 amino acid positions, or alternatively from 2 to 100 amino acid positions, or alternatively from 3 to 100 amino acid positions, or alternatively from 4 to 100 amino acid positions, or alternatively from 5 to 100 amino acid positions, or alternatively from 6 to 100 amino acid positions, or alternatively from 7 to 100 amino acid positions, or alternatively from 8 to 100 amino acid positions, or alternatively from 9 to 100 amino acid positions, or alternatively from 10 to 100 amino acid positions, or alternatively from 15 to 100 amino acid positions, or alternatively from 20 to 100 amino acid positions, or alternatively from 30 to 100 amino acid positions, or alternatively from 40 to 100 amino acid positions, or alternatively from 50 to 100 amino acid positions, or any integer therein, wherein the positions are other than the variant amino acid positions set forth in Tables 54, 56 or 58 or Example XXXXIII. In some aspects, the conservative amino acid sequence is a chemically conservative or an evolutionary conservative amino acid substitution. Methods of identifying conservative amino acids are well known to one of skill in the art, any one of which can be used to generate the isolated polypeptides of the invention.

[0434] In some embodiments, the isolated polypeptide of the invention can include no modification at from 2 to 300 amino acid positions, or alternatively 2 to 300 amino acid positions, or alternatively 3 to 300 amino acid positions, or alternatively 4 to 300 amino acid positions, or alternatively 5 to 300 amino acid positions, or alternatively 10 to 300 amino acid positions, or alternatively 20 to 300 amino acid positions, or alternatively 30 to 300 amino acid positions, or alternatively 40 to 300 amino acid positions, or alternatively 50 to 300 amino acid positions, or alternatively 60 to 300 amino acid positions, or alternatively 80 to 300 amino acid positions, or alternatively 100 to 300 amino acid positions, or alternatively 150 to 300 amino acid positions, or alternatively 200 to 300 amino acid positions, or alternatively 250 to 300 amino acid positions, or any integer therein, compared to the parent (wild-type) sequence, wherein the positions are selected from those that are identical to between 2, 3, 4, or 5 of the amino acid sequences referenced in Tables 53, 55 or 57. In a particular embodiment, a variant polypeptide of the invention that is a variant aldehyde dehydrogenase includes a variant aldehyde dehydrogenase as disclosed herein, with the proviso that the variant aldehyde dehydrogenase excludes the substitution Ile139Leu, Met204Asp, and/or Arg396Lys (numbered according to the sequence described in US 2014/0045232).

[0435] It is understood that the variant polypeptides such as polypeptide variants of cat2, aldehyde dehydrogenase and alcohol dehydrogenase can carry out a similar enzymatic reaction as the parent polypeptide, for example, converting 4-hydroxybutyrate to 4-hydroxybutyryl-CoA, converting 4-hydroxybutyryl-CoA to 4-hydroxybutyraldehyde, or converting 4-hydroxybutyraldehyde to 1,4-butanediol, as disclosed herein (see Example XXXXIII). It is further understood that the polypeptide variants can include variants that provide a beneficial characterstic to the polypeptide, including but not limited to, improved catalytic activity, increased catalytic, turnover, increased substrate affinity, decreased product inhibition, and/or protein or enzyme stability. In a particular embodiment, the variants can have improved characteristics of stability while exhibiting similar activity to a wild type or parent polypeptide. In another particular embodiment, the enzyme variant can exhibit an activity that is at least the same or higher than a wild type or parent polypeptide, for example, 1.2, 1.5, 2, 2.5, 3, 3.5, 4, 4.5, 5, 5.5, 6, 6.5, 7, 7.5, 8, 8.5, 9, 9.5, 10, or even higher fold activity of the variant polypeptide over a wild type or parent polypeptide (see Example XXXXIII).

[0436] The polypeptides of the invention can be isolated by a variety of methods well-known in the art, for example, recombinant expression systems, precipitation, gel filtration, ion-exchange, reverse-phase and affinity chromatography, and the like. Other well-known methods are described in Deutscher et al., Guide to Protein Purification: Methods in Enzymology, Vol. 182, (Academic Press, (1990)). Alternatively, the isolated polypeptides of the present invention can be obtained using well-known recombinant methods (see, for example, Sambrook et al., supra, 1989; Ausubel et al., supra, 1999). The methods and conditions for biochemical purification of a polypeptide of the invention can be chosen by those skilled in the art, and purification monitored, for example, by a functional assay.

[0437] One non-limiting example of a method for preparing the invention polypeptide is to express nucleic acids encoding the polypeptide in a suitable host cell, such as a bacterial cell, a yeast cell, or other suitable cell, using methods well known in the art, and recovering the expressed polypeptide, again using well-known purification methods, as described herein. Invention polypeptides can be isolated directly from cells that have been transformed with expression vectors as described herein. Recombinantly expressed polypeptides of the invention can also be expressed as fusion proteins with appropriate affinity tags, such as glutathione S transferase (GST), poly His, streptavidin, and the like, and affinity purified, if desired. A polypeptide of the invention can retain the affinity tag, if desired, or optionally the affinity tag can be removed from the polypeptide using well known methods to remove an affinity tag, for example, using appropriate enzymatic or chemical cleavage. Thus, the invention provides polypeptides of the invention without or optionally with an affinity tag. Accordingly, in some embodiments, the invention provides a host cell expressing a polypeptide of the invention disclosed herein. An invention polypeptide can also be produced by chemical synthesis using a method of polypeptide synthesis well know to one of skill in the art.

[0438] In some embodiments, the invention provides using a polypeptide disclosed herein as a biocatalyst. A “biocatalyst,” as used herein, refers to a biological substance that initiates or modifies the rate of a chemical reaction. A biocatalyst can be an enzyme. A polypeptide of the invention can be used to increase the rate of conversion of a substrate to a product as disclosed herein. In the context of an industrial reaction, a polypeptide of the invention can be used, absent a host cell, to improve reactions generating 4-HB, GBL, 4-HBal, 4-HBCoA, BDO and/or putrescine, for example, using in vitro methods.

[0439] In some embodiments, the invention provides a composition having a polypeptide disclosed herein and at least one substrate for the polypeptide. Substrate for each of the polypeptides disclosed herein are described herein and are exemplified in the Figures. The polypeptide within the composition of the invention can react with a substrate under in vitro conditions. In this context, an in vitro condition refers to a reaction in the absence of or outside of a microorganism of the invention.

[0440] In some embodiments, the invention provides a method of constructing a host strain that can include, among other steps, introducing a vector disclosed herein into a host cell that is capable of fermentation. Vectors of the invention can be introduced stably or transiently into a host cell using techniques well known in the art including, but not limited to, conjugation, electroporation, chemical transformation, transduction, transfection, and ultrasound transformation. Additional methods are disclosed herein, any one of which can be used in the method of the invention.

[0441] In some embodiments, the invention provides a method for producing 4-HB, GBL, 4-HBal, 4-HBCoA, BDO and/or putrescine by culturing a host cell disclosed herein under conditions and for a sufficient period of time to produce 4-HB, GBL, 4-HBal, 4-HBCoA, BDO and/or putrescine. Exemplary culturing conditions, including various fermentation conditions, are disclosed herein, any one of which can be used in the method of the invention.

[0442] It is understood that modifications which do not substantially affect the activity of the various embodiments of this invention are also provided within the definition of the invention provided herein. Accordingly, the following examples are intended to illustrate but not limit the present invention.

### Example I

### Biosynthesis of 4-Hydroxybutanoic Acid

[0443] This example describes exemplary biochemical pathways for 4-HB production.

[0444] Previous reports of 4-HB synthesis in microbes have focused on this compound as an intermediate in production of the biodegradable plastic poly-hydroxyalkanoate (PHA) (U.S. Pat. No. 6,117,658). The use of 4-HB/3-HB copolymers over poly-3-hydroxybutyrate polymer (PHB) can result in plastic that is less brittle (Saito and Doi, Intl. J. Biol. Macromol. 16:99-104 (1994)). The production of monomeric 4-HB described herein is a fundamentally distinct process for several reasons: (1) the product is secreted, as opposed to PHA which is produced intracellularly and remains in the cell; (2) for organisms that produce hydroxybutanoate polymers, free 4-HB is not produced, but rather the Coenzyme A derivative is used by the polyhydroxyalkanoate synthase; (3) in the case of the polymer, formation of the granular product changes thermodynamics; and (4) extracellular pH is not an issue for production of the polymer, whereas it will affect whether 4-HB is present in the free acid or conjugate base state, and also the equilibrium between 4-HB and GBL.

[0445] 4-HB can be produced in two enzymatic reduction steps from succinate, a central metabolite of the TCA cycle, with succinic semialdehyde as the intermediate (FIG. 1). The first of these enzymes, succinic semialdehyde dehydrogenase, is native to many organisms including E. coli, in which both NADH- and NADPH-dependent enzymes have been found (Donnelly and Cooper, Eur. J. Biochem. 113:555-561 (1981); Donnelly and Cooper, J. Bacteriol. 145:1425-1427 (1981); Marek and Henson, J. Bacteriol. 170:991-994 (1988)). There is also evidence supporting succinic semialdehyde dehydrogenase activity in S. cerevisiae (Ramos et al., Eur. J. Biochem. 149:401-404 (1985)), and a putative gene has been identified by sequence homology. However, most reports indicate that this enzyme proceeds in the direction of succinate synthesis, as shown in FIG. 1 (Donnelly and Cooper, supra; Lutke-Eversloh and Steinbuchel, FEMS Microbiol. Lett. 181:63-71 (1999)), participating in the degradation pathway of 4-HB and gamma-aminobutyrate. Succinic semialdehyde also is natively produced by certain microbial organisms such as E. coli through the TCA cycle intermediate α-ketogluterate via the action of two enzymes: glutamate:succinic semialdehyde transaminase and glutamate decarboxylase. An alternative pathway, used by the obligate anaerobe Clostridium kluyveri to degrade succinate, activates succinate to succinyl-CoA, then converts succinyl-CoA to succinic semialdehyde using an alternative succinic semialdehyde dehydrogenase which is known to function in this direction (Sohling and Gottschalk, Eur. J. Biochem. 212:121-127 (1993)). However, this mute has the energetic cost of ATP required to convert succinate to succinyl-CoA.

[0446] The second enzyme of the pathway, 4-hydroxybutanoate dehydrogenase, is not native to E. coli or yeast but is found in various bacteria such as C. kluyveri and Ralstonia eutropha (Lutke-Eversloh and Steinbuchel, supra; Sohling and Gottschalk, J. Bacteriol. 178:871-880 (1996); Valentin et al., Eur. J. Biochem. 227:43-60 (1995); Wolff and Kenealy, Protein Expr. Purif. 6:206-212 (1995)). These enzymes are known to be NADH-dependent, though NADPH-dependent forms also exist. An additional pathway to 4-HB from alpha-ketoglutarate was demonstrated in E. coli resulting in the accumulation of poly(4-hydroxybutyric acid) (Song et al., Wei Sheng Wu Xue. Bao. 45:382-386 (2005)). The recombinant strain required the overexpression of three heterologous genes, PHA synthase (R. eutropha), 4-hydroxybutyrate dehydrogenase (R. eutropha) and 4-hydroxybutyrate:CoA transferase (C. kluyveri), along with two native E. coli genes: glutamate:succinic semialdehyde transaminase and glutamate decarboxylase. Steps 4 and 5 in FIG. 1 can alternatively be carried out by an alpha-ketoglutarate decarboxylase such as the one identified in Euglena gracilis (Shigeoka et al., Biochem. J. 282(Pt2):319-323 (1992); Shigeoka and Nakano, Arch. Biochem. Biophys. 288:22-28 (1991); Shigeoka and Nakano, Biochem J. 292(Pt 2):463-467 (1993)). However, this enzyme has not previously been applied to impact the production of 4-HB or related polymers in any organism.

[0447] The microbial production capabilities of 4-hydroxybutyrate were explored in two microbes, Escherichia coli and Saccharomyces cerevisiae, using in silico metabolic models of each organism. Potential pathways to 4-HB proceed via a succinate, succinyl-CoA, or alpha-ketoglutarate intermediate as shown in FIG. 1.

[0448] A first step in the 4-HB production pathway from succinate involves the conversion of succinate to succinic semialdehyde via an NADH- or NADPH-dependant succinic semialdehyde dehydrogenase. In E. coli, gabD is an NADP-dependant succinic semialdehyde dehydrogenase and is part of a gene cluster involved in 4-aminobutyrate uptake and degradation (Niegemann et al., Arch. Microbiol. 160:454-460 (1993); Schneider et al., J. Bacteriol. 184:6976-6986 (2002)). sad is believed to encode the enzyme for NAD-dependant succinic semialdehyde dehydrogenase activity (Marek and Henson, supra). S. cerevisiae contains only the NADPH-dependant succinic semialdehyde dehydrogenase, putatively assigned to UGA2, which localizes to the cytosol (Huh et al., Nature 425:686-691 (2003)). The maximum yield calculations assuming the succinate pathway to 4-HB in both E. coli and S. cerevisiae require only the assumption that a non-native 4-HB dehydrogenase has been added to their metabolic networks.

[0449] The pathway from succinyl-CoA to 4-hydroxybutyrate was described in U.S. Pat. No. 6,117,658 as part of a process for making polyhydroxyalkanoates comprising 4-hydroxybutyrate monomer units. Clostridium kluyveri is one example organism known to possess CoA-dependant succinic semialdehyde dehydrogenase activity (Sohling and Gottschalk, supra; Sohling and Gottschalk, supra). In this study, it is assumed that this enzyme, from C. kluyveri or another organism, is expressed in E. coli or S. cerevisiae along with a non-native or heterologous 4-HB dehydrogenase to complete the pathway from succinyl-CoA to 4-HB. The pathway from alpha-ketoglutarate to 4-HB was demonstrated in E. coli resulting in the accumulation of poly(4-hydroxybutyric acid) to 30% of dry cell weight (Song et al., supra). As E. coli and S. cerevisiae natively or endogenously possess both glutamate:succinic semialdehyde transaminase and glutamate decarboxylase (Coleman et al., J. Biol. Chem. 276:244-250 (2001)), the pathway from AKG to 4-HB can be completed in both organisms by assuming only that a non-native 4-HB dehydrogenase is present.

### Example II

### Biosynthesis of 1,4-Butanediol from Succinate and Alpha-ketoglutarate

[0450] This example illustrates the construction and biosynthetic production of 4-HB and BDO from microbial organisms. Pathways for 4-HB and BDO are disclosed herein.

[0451] There are several alternative enzymes that can be utilized in the pathway described above. The native or endogenous enzyme for conversion of succinate to succinyl-CoA (Step 1 in FIG. 1) can be replaced by a CoA transferase such as that encoded by the cat1 gene C. kluyveri (Sohling and Gottschalk, Eur. J Biochem. 212:121-127 (1993)), which functions in a similar manner to Step 9. However, the production of acetate by this enzyme may not be optimal, as it might be secreted rather than being converted back to acetyl-CoA. In this respect, it also can be beneficial to eliminate acetate formation in Step 9. As one alternative to this CoA transferase, a mechanism can be employed in which the 4-HB is first phosphorylated by ATP and then converted to the CoA derivative, similar to the acetate kinase/phosphotransacetylase pathway in E. coli for the conversion of acetate to acetyl-CoA. The net cost of this mute is one ATP, which is the same as is required to regenerate acetyl-CoA from acetate. The enzymes phosphotransbutyrylase (ptb) and butyrate kinase (bk) are known to carry out these steps on the non-hydroxylated molecules for butyrate production in C. acetobutylicum (Cary et al., Appl Environ Microbiol 56:1576-1583 (1990); Valentine, R. C. and R. S. Wolfe, J Biol Chem. 235:1948-1952 (1960)). These enzymes are reversible, allowing synthesis to proceed in the direction of 4-HB.

[0452] BDO also can be produced via α-ketoglutarate in addition to or instead of through succinate. A described previously, and exemplified further below, one pathway to accomplish product biosynthesis is with the production of succinic semialdehyde via α-ketoglutarate using the endogenous enzymes (FIG. 1, Steps 4-5). An alternative is to use an α-ketoglutarate decarboxylase that can perform this conversion in one step (FIG. 1, Step 8; Tian et al., Proc Natl Acad Sci USA 102:10670-10675 (2005)).

[0453] For the construction of different strains of BDO-producing microbial organisms, a list of applicable genes was assembled for corroboration. Briefly, one or more genes within the 4-HB and/or BDO biosynthetic pathways were identified for each step of the complete BDO-producing pathway shown in FIG. 1, using available literature resources, the NCBI genetic database, and homology searches. The genes cloned and assessed in this study are presented below in in Table 6, along with the appropriate references and URL citations to the polypeptide sequence. As discussed further below, some genes were synthesized for codon optimization while others were cloned via PCR from the genomic DNA of the native or wild-type organism. For some genes both approaches were used, and in this case the native genes are indicated by an “n” suffix to the gene identification number when used in an experiment. Note that only the DNA sequences differ; the proteins are identical.

TABLE 6
Genes expressed in host BDO-producting microbial organisms.

| | Reaction | | | | | |
|---|---|---|---|---|---|---|
| Gene ID | number | Gene | Source | | Link to protein sequence | |
| number | (FIG. 1) | name | organism | Enzyme name | (path following www) | Reference |
| 0001 | 9 | Cat2 | Clostridium | 4-hydroxybutyrate | ncbi.nlm.nih.gov/entrez/viewer.fcgi?db=nuccore&id=1228100 | 1 |
| | | | kluyveri | coenzyme A | | |
| | | | DSM 555 | transferase | | |
| 0002 | 12/13 | adhE | Clostridium | Aldehyde/alcohol | ncbi.nlm.nih.gov/entrez/viewer.fcgi?db=protein&val=15004739 | 2 |
| | | | acetobutylicum | dehydrogenase | | |
| | | | ATCC 824 | | | |
| 0003 | 12/13 | adhE2 | Clostridium | Aldehyde/alcohol | ncbi.nlm.nih.gov/entrez/viewer.fcgi?val=NP_149325.1 | 2 |
| | | | acetobutylicum | dehydrogenase | | |
| | | | ATCC 824 | | | |
| 0004 | 1 | Cat1 | Clostridium | Succinate | ncbi.nlm.nih.gov/entrez/viewer.fcgi?db=nuccore&id=1228100 | 1 |
| | | | kluyveri | coenzyme A | | |
| | | | DSM 555 | transferase | | |
| 0008 | 6 | sucD | Clostridium | Succinic | ncbi.nlm.nih.gov/entrez/viewer.fcgi?db=nuccore&id=1228100 | 1 |
| | | | kluyveri | semialdehyde | | |
| | | | DSM 555 | dehydrogenase | | |
| | | | | (CoA-dependent) | | |
| 0009 | 7 | 4-HBd | Ralstonia | 4-hydroxybutyrate | ncbi.nlm.nih.gov/entrez/viewer.fcgi?val=YP_726053.1 | 2 |
| | | | eutropha H16 | dehydrogenase | | |
| | | | | (NAD-dependent) | | |
| 0010 | 7 | 4-HBd | Clostridium | 4-hydroxybutyrate | ncbi.nlm.nih.gov/entrez/viewer.fcgi?db=nuccore&id=1228100 | 1 |
| | | | kluyveri | dehydrogenase | | |
| | | | DSM 555 | (NAD-dependent) | | |
| 0011 | 12/13 | adhE | E. coli | Aldehyde/alcohol | shigen.nig.ac.jp/ecoli/pec/ | |
| | | | | | genes.List.DetailAction.do?fromListFlag= | |
| | | | | | true&featureType=1&orfId=1219 | |
| | | | | dehydrogenase | | |
| 0012 | 12/13 | yqhD | E. coli | Aldehyde/alcohol | shigen.nig.ac.jp/ecoli/pec/genes.List.DetailAction.do | |
| | | | | dehydrogenase | | |
| 0013 | 13 | bdhB | Clostridium | Butanol | ncbi.nlm.nih.gov/entrez/viewer.fcgi?val=NP_349891.1 | 2 |
| | | | acetobutylicum | dehydrogenase II | | |
| | | | ATCC 824 | | | |
| 0020 | 11 | ptb | Clostridium | Phospho- | ncbi.nlm.nih.gov/entrez/viewer.fcgi?db=protein&id=15896327 | 2 |
| | | | acetobutylicum | transbutyrylase | | |
| | | | ATCC 824 | | | |
| 0021 | 10 | buk1 | Clostridium | Butyrate kinase I | ncbi.nlm.nih.gov/entrez/viewer.fcgi?db=protein&id=20137334 | 2 |
| | | | acetobutylicum | | | |
| | | | ATCC 824 | | | |
| 0022 | 10 | buk2 | Clostridium | Butyrate kinase II | ncbi.nlm.nih.gov/entrez/viewer.fcgi?db=protein&id=20137415 | 2 |
| | | | acetobutylicum | | | |
| | | | ATCC 824 | | | |
| 0023 | 13 | adhEm | isolated from | Alcohol | | (37)d} |
| | | | metalibrary | dehydrogenase | | |
| | | | of anaerobic | | | |
| | | | sewage | | | |
| | | | digester | | | |
| | | | microbial | | | |
| | | | consortia | | | |
| 0024 | 13 | adhE | Clostridium | Alcohol | genome.jp/dbget-bin/www_bget?cth:Cthe_0423 | |
| | | | thermocellum | dehydrogenase | | |
| 0025 | 13 | ald | Clostridium | Coenzyme A- | ncbi.nlm.nih.gov/entrez/viewer.fcgi?db=protein&id=49036681 | (31)d} |
| | | | beijerinckii | acylating aldehyde | | |
| | | | | dehydrogenase | | |
| 0026 | 13 | bdhA | Clostridium | Butanol | ncbi.nlm.nih.gov/entrez/viewer.fcgi?val=NP_349892.1 | 2 |
| | | | acetobutylicum | dehydrogenase | | |
| | | | ATCC 824 | | | |
| 0027 | 12 | bld | Clostridium | Butyraldehyde | ncbi.nlm.nih.gov/entrez/viewer.fcgi?db=protein&id=31075383 | 4 |
| | | | saccharoperbutyl- | dehydrogenase | | |
| | | | acetonicum | | | |
| 0028 | 13 | bdh | Clostridium | Butanol | ncbi.nlm.nih.gov/entrez/viewer.fcgi?db=protein&id=124221917 | 4 |
| | | | saccharoperbutyl- | dehydrogenase | | |
| | | | acetonicum | | | |
| 0029 | 12/13 | adhE | Clostridium | Aldehyde/alcohol | genome.jp/dbget-bin/www_bget?ctc:CTC01366 | |
| | | | tetani | dehydrogenase | | |
| 0030 | 12/13 | adhE | Clostridium | Aldehyde/alcohol | genome.jp/dbget-bin/www_bget?cpe:CPE2531 | |
| | | | perfringens | dehydrogenase | | |
| 0031 | 12/13 | adhE | Clostridium | Aldehyde/alcohol | genome.jp/dbget-bin/www_bget?cdf:CD2966 | |
| | | | difficile | dehydrogenase | | |
| 0032 | 8 | sucA | Mycobacterium | α-ketoglutarate | ncbi.nlm.nih.gov/entrez/viewer.fcgi?val=YP_977400.1 | 5 |
| | | | bovis | decarboxylase | | |
| | | | BCG, Pasteur | | | |
| 0033 | 9 | cat2 | Clostridium | 4-hydroxybutyrate | ncbi.nlm.nih.gov/entrez/viewer.fcgi?db=protein&val=6249316 | |
| | | | aminobutyricum | coenzyme A | | |
| | | | | transferase | | |
| 0034 | 9 | cat2 | Porphyromonas | 4-hydroxybutyrate | ncbi.nlm.nih.gov/entrez/viewer.fcgi?db=protein&val=34541558 | |
| | | | gingivalis | coenzyme A | | |
| | | | W83 | transferase | | |
| 0035 | 6 | sucD | Porphyromonas | Succinic | ncbi.nlm.nih.gov/entrez/viewer.fcgi?val=NP_904963.1 | |
| | | | gingivalis | semialdehyde | | |
| | | | W83 | dehydrogenase | | |
| | | | | (CoA-dependent) | | |
| 0036 | 7 | 4-HBd | Porphyromonas | NAD-dependent | ncbi.nlm.nih.gov/entrez/viewer.fcgi?val=NP_904964.1 | |
| | | | gingivalis | 4-hydroxybutyrate | | |
| | | | W83 | dehydrogenase | | |
| 0037 | 7 | gbd | Uncultured | 4-hydroxybutyrate | ncbi.nlm.nih.gov/entrez/viewer.fcgi?db=nuccore&id=5916168 | 6 |
| | | | bacterium | dehydrogenase | | |
| 0038 | 1 | sucCD | E. coli | Succinyl-CoA | shigen.nig.ac.jp/ecoli/pec/genes.List.DetailAction.do | |
| | | | | synthetase | | |

¹Sohling and Gottschalk, Eur. J. Biochem. 212: 121-127 (1993); Sohling and Gottschalk, J. Bacteriol. 178: 871-880 (1996)
²Nolling et al., J., J. Bacteriol. 183: 4823-4838 (2001)
³Pohlmann et al., Nat. Biotechnol. 24: 1257-1262 (2006)
⁴Kosaka et al., Biosci. Biotechnol. Biochem. 71: 58-68 (2007)
⁵Brosch et al., Proc. Natl. Acad. Sci. U.S.A. 104: 5596-5601 (2007)
⁶Henne et al., Appl. Environ. Microbiol. 65: 3901-3907 (1999)

[0454] Expression Vector Construction for BDO pathway. Vector backbones and some strains were obtained from Dr. Rolf Lutz of Expressys (expressys.de/). The vectors and strains are based on the pZ Expression System developed by Dr. Rolf Lutz and Prof Hermann Bujard (Lutz, R and H. Bujard, Nucleic Acids Res 25:1203-1210 (1997)). Vectors obtained were pZE13luc, pZA33luc, pZS*13luc and pZE22luc and contained the luciferase gene as a stuffer fragment. To replace the luciferase stuffer fragment with a lacZ-alpha fragment flanked by appropriate restriction enzyme sites, the luciferase stuffer fragment was first removed from each vector by digestion with EcoRI and XbaI. The lacZ-alpha fragment was PCR amplified from pUC19 with the following primers:

lacZalpha-RI
(SEQ ID NO: 1)
5′GACGAATTCGCTAGCAAGAGGAGAAGTCGACATGTCCAATTCAC
TGGCCGTCGTTTTAC3′
lacZalpha 3′BB
(SEQ ID NO: 2)
5′-GACCCTAGGAAGCTTTCTAGAGTCGACCTATGCGGCATCAGAG
CAGA-3′.

[0455] This generated a fragment with a 5′ end of EcoRI site, NheI site, a Ribosomal Binding Site, a SalI site and the start codon. On the 3′ end of the fragment contained the stop codon, XbaI, HindIII, and AvrII sites. The PCR product was digested with EcoRI and AvrII and ligated into the base vectors digested with EcoRI and XbaI (XbaI and AvrII have compatible ends and generate a non-site). Because NheI and XbaI restriction enzyme sites generate compatible ends that can be ligated together (but generate a NheI/XbaI non-site that is not digested by either enzyme), the genes cloned into the vectors could be “Biobricked” together (openwetware.org/wiki/Synthetic_Biology:BioBricks). Briefly, this method allows joining an unlimited number of genes into the vector using the same 2 restriction sites (as long as the sites do not appear internal to the genes), because the sites between the genes are destroyed after each addition.

[0456] All vectors have the pZ designation followed by letters and numbers indication the origin of replication, antibiotic resistance marker and promoter/regulatory unit. The origin of replication is the second letter and is denoted by E for ColE1, A for p15A and S for pSC101-based origins. The first number represents the antibiotic resistance marker (1 for Ampicillin, 2 for Kanamycin, 3 for Chloramphenicol, 4 for Spectinomycin and 5 for Tetracycline). The final number defines the promoter that regulated the gene of interest (1 for P_{LtetO-1}, 2 for P_{LlacO}, 3 for P_{AllacO-1}, and 4 for P_{lac/ara-1}). The MCS and the gene of interest follows immediately after. For the work discussed here we employed two base vectors, pZA33 and pZE13, modified for the biobricks insertions as discussed above. Once the gene(s) of interest have been cloned into them, resulting plasmids are indicated using the four digit gene codes given in Table 6; e.g., pZA33-XXXX-YYYY- . . . .

[0457] Host Strain Construction. The parent strain in all studies described here is E. coli K-12 strain MG1655. Markerless deletion strains in adhE, gabD, and aldA were constructed under service contract by a third party using the redET method (Datsenko, K. A. and B. L. Wanner, Proc Natl Acad Sci USA 97:6640-6645 (2000)). Subsequent strains were constructed via bacteriophage P1 mediated transduction (Miller, J. Experiments in Molecular Genetics, Cold Spring Harbor Laboratories, New York (1973)). Strain C600Z1 (laci^{q}, PN25-tetR, Sp^{R}, lacY1, leuB6,mcrB+, supE44, thi-1, thr-1, tonA21) was obtained from Expressys and was used as a source of a lacI^{q} allele for P1 transduction. Bacteriophage P1vir was grown on the C600Z1 E. coli strain, which has the spectinomycin resistance gene linked to the lacI^{q}. The P1 lysate grown on C600Z1 was used to infect MG1655 with selection for spectinomycin resistance. The spectinomycin resistant colonies were then screened for the linked lacI^{q} by determining the ability of the transductants to repress expression of a gene linked to a P_{AllacO-1} promoter. The resulting strain was designated MG 1655 lacI^{q}. A similar procedure was used to introduce lacI^{Q} into the deletion strains.

[0458] Production of 4-HB From Succinate. For construction of a 4-HB producer from succinate, genes encoding steps from succinate to 4-HB and 4-HB-CoA (1, 6, 7, and 9 in FIG. 1) were assembled onto the pZA33 and pZE13 vectors as described below. Various combinations of genes were assessed, as well as constructs bearing incomplete pathways as controls (Tables 7 and 8). The plasmids were then transformed into host strains containing lacI^{Q}, which allow inducible expression by addition of isopropyl β-D-1-thiogalactopyranoside (IPTG). Both wild-type and hosts with deletions in genes encoding the native succinic semialdehyde dehydrogenase (step 2 in FIG. 1) were tested.

[0459] Activity of the heterologous enzymes were first tested in in vitro assays, using strain MG1655 lacI^{Q} as the host for the plasmid constructs containing the pathway genes. Cells were grown aerobically in LB media (Difco) containing the appropriate antibiotics for each construct, and induced by addition of IPTG at 1 mM when the optical density (OD600) reached approximately 0.5. Cells were harvested after 6 hours, and enzyme assays conducted as discussed below.

[0460] In Vitro Enzyme Assays. To obtain crude extracts for activity assays, cells were harvested by centrifugation at 4,500 rpm (Beckman-Coulter, Allegera X-15R) for 10 min. The pellets were resuspended in 0.3 mL BugBuster (Novagen) reagent with benzonase and lysozyme, and lysis proceeded for 15 minutes at mom temperature with gentle shaking. Cell-free lysate was obtained by centrifugation at 14,000 rpm (Eppendorf centrifuge 5402) for 30 min at 4° C. Cell protein in the sample was determined using the method of Bradford et al., Anal. Biochem. 72:248-254 (1976), and specific enzyme assays conducted as described below. Activities are reported in Units/mg protein, where a unit of activity is defined as the amount of enzyme required to convert 1 μmol of substrate in 1 min. at room temperature. In general, reported values are averages of at least 3 replicate assays.

[0461] Succinyl-CoA transferase (Cat 1) activity was determined by monitoring the formation of acetyl-CoA from succinyl-CoA and acetate, following a previously described procedure Sohling and Gottschalk, J. Bacteriol. 178:871-880 (1996). Succinyl-CoA synthetase (SucCD) activity was determined by following the formation of succinyl-CoA from succinate and CoA in the presence of ATP. The experiment followed a procedure described by Cha and Parks, J. Biol. Chem. 239:1961-1967 (1964). CoA-dependent succinate semialdehyde dehydrogenase (SucD) activity was determined by following the conversion of NAD to NADH at 340 nm in the presence of succinate semialdehyde and CoA (Sohling and Gottschalk, Eur. J. Biochem. 212:121-127 (1993)). 4-HB dehydrogenase (4-HBd) enzyme activity was determined by monitoring the oxidation of NADH to NAD at 340 nm in the presence of succinate semialdehyde. The experiment followed a published procedure Gerhardt et al. Arch. Microbiol. 174:189-199 (2000). 4-HB CoA transferase (Cat2) activity was determined using a modified procedure from Scherf and Buckel, Appl. Environ. Microbiol 57:2699-2702 (1991). The formation of 4-HB-CoA or butyryl-CoA formation from acetyl-CoA and 4-HB or butyrate was determined using HPLC.

[0462] Alcohol (ADH) and aldehyde (ALD) dehydrogenase was assayed in the reductive direction using a procedure adapted from several literature sources (Dune et al., FEMS Microbiol Rev. 17:251-262 (1995); Palosaari and Rogers, J. Bacteriol. 170:2971-2976 (1988) and Welch et al., Arch. Biochem. Biophys. 273:309-318 (1989). The oxidation of NADH is followed by reading absorbance at 340 nM every four seconds for a total of 240 seconds at mom temperature. The reductive assays were performed in 100 mM MOPS (adjusted to pH 7.5 with KOH), 0.4 mM NADH, and from 1 to 50 μl of cell extract. The reaction is started by adding the following reagents: 100 μl of 100 mM acetaldehyde or butyraldehyde for ADH, or 100 μl of 1 mM acetyl-CoA or butyryl-CoA for ALD. The Spectrophotometer is quickly blanked and then the kinetic read is started. The resulting slope of the reduction in absorbance at 340 nM per minute, along with the molar extinction coefficient of NAD(P)H at 340 nM (6000) and the protein concentration of the extract, can be used to determine the specific activity.

[0463] The enzyme activity of PTB is measured in the direction of butyryl-CoA to butyryl-phosphate as described in Cary et al. J. Bacteriol. 170:4613-4618 (1988). It provides inorganic phosphate for the conversion, and follows the increase in free CoA with the reagent 5,5′-dithiobis-(2-nitrobenzoic acid), or DTNB. DTNB rapidly reacts with thiol groups such as free CoA to release the yellow-colored 2-nitro-5-mercaptobenzoic acid (TNB), which absorbs at 412 nm with a molar extinction coefficient of 14,140 M cm⁻¹. The assay buffer contained 150 mM potassium phosphate at pH 7.4, 0.1 mM DTNB, and 0.2 mM butyryl-CoA, and the reaction was started by addition of 2 to 50 μL cell extract. The enzyme activity of BK is measured in the direction of butyrate to butyryl-phosphate formation at the expense of ATP. The procedure is similar to the assay for acetate kinase previously described Rose et al., J. Biol. Chem. 211:737-756 (1954). However it has been found that another acetate kinase enzyme assay protocol provided by Sigma to be more useful and sensitive. This assay links conversion of ATP to ADP by acetate kinase to the linked conversion of ADP and phosphoenolpyruvate (PEP) to ATP and pyruvate by pyruvate kinase, followed by the conversion of pyruvate and NADH to lactate and NAD+ by lactate dehydrogenase. Substituting butyrate for acetate is the only major modification to allow the assay to follow BK enzyme activity. The assay mixture contained 80 mM triethanolamine buffer at pH 7.6, 200 mM sodium butyrate, 10 mM MgCl2, 0.1 mM NADH, 6.6 mM ATP, 1.8 mM phosphoenolpyruvate. Pyruvate kinase, lactate dehydrogenase, and myokinase were added according to the manufacturer's instructions. The reaction was started by adding 2 to 50 μL cell extract, and the reaction was monitored based on the decrease in absorbance at 340 nm indicating NADH oxidation.

[0464] Analysis of CoA Derivatives by HPLC. An HPLC based assay was developed to monitor enzymatic reactions involving coenzyme A (CoA) transfer. The developed method allowed enzyme activity characterization by quantitative determination of CoA, acetyl CoA (AcCoA), butyryl CoA (BuCoA) and 4-hydroxybutyrate CoA (4-HBCoA) present in in-vitro reaction mixtures. Sensitivity down to low μM was achieved, as well as excellent resolution of all the CoA derivatives of interest.

[0465] Chemical and sample preparation was performed as follows. Briefly, CoA, AcCoA, BuCoA and all other chemicals, were obtained from Sigma-Aldrich. The solvents, methanol and acetonitrile, were of HPLC grade. Standard calibration curves exhibited excellent linearity in the 0.01-1 mg/mL concentration range. Enzymatic reaction mixtures contained 100 mM Tris HCl buffer (pH 7), aliquots were taken at different time points, quenched with formic acid (0.04% final concentration) and directly analyzed by HPLC.

[0466] HPLC analysis was performed using an Agilent 1100 HPLC system equipped with a binary pump, degasser, thermostated autosampler and column compartment, and diode array detector (DAD), was used for the analysis. A reversed phase column, Kromasil 100 5 um C18, 4.6×150 mm (Peeke Scientific), was employed. 25 mM potassium phosphate (pH 7) and methanol or acetonitrile, were used as aqueous and organic solvents at 1 mL/min flow rate. Two methods were developed: a short one with a faster gradient for the analysis of well-resolved CoA, AcCoA and BuCoA, and a longer method for distinguishing between closely eluting AcCoA and 4-HBCoA. Short method employed acetonitrile gradient (0 min-5%, 6 min-30%, 6.5 min-5%, 10 min-5%) and resulted in the retention times 2.7, 4.1 and 5.5 min for CoA, AcCoA and BuCoA, respectively. In the long method methanol was used with the following linear gradient: 0 min-5%, 20 min-35%, 20.5 min-5%, 25 min-5%. The retention times for CoA, AcCoA, 4-HBCoA and BuCoA were 5.8, 8.4, 9.2 and 16.0 min, respectively. The injection volume was 5 μL, column temperature 30° C., and UV absorbance was monitored at 260 nm.

[0467] The results demonstrated activity of each of the four pathway steps (Table 7), though activity is clearly dependent on the gene source, position of the gene in the vector, and the context of other genes with which it is expressed. For example, gene 0035 encodes a succinic semialdehyde dehydrogenase that is more active than that encoded by 0008, and 0036 and 0010n are more active 4-HB dehydrogenase genes than 0009. There also seems to be better 4-HB dehydrogenase activity when there is another gene preceding it on the same operon.

TABLE 7
In vitro enzyme activities in cell extracts from MG1655 lacI^{Q} containing the plasmids expressing
genes in the 4-HB-CoA pathway. Activities are reported in Units/mg protein, where a unit of activity is
defined as the amount of enzyme required to convert 1 μmol of substrate in 1 min. at room temperature.

| Sample # | pZE13 (a) | pZA33 (b) | OD600 | Cell Prot (c) | Cat1 | SucD | 4HBd | Cat2 |
|---|---|---|---|---|---|---|---|---|
| 1 | cat1 (0004) | | 2.71 | 6.43 | 1.232 | 0.00 | | |
| 2 | cat1 (0004)-sucD (0035) | | 2.03 | 5.00 | 0.761 | 2.57 | | |
| 3 | cat1 (0004)-sucD (0008) | | 1.04 | 3.01 | 0.783 | 0.01 | | |
| 4 | sucD (0035) | | 2.31 | 6.94 | | 2.32 | | |
| 5 | sucD (0008) | | 1.10 | 4.16 | | 0.05 | | |
| 6 | | 4hbd (0009) | 2.81 | 7.94 | 0.003 | | 0.25 | |
| 7 | | 4hbd (0036) | 2.63 | 7.84 | | | 3.31 | |
| 8 | | 4hbd (0010n) | 2.00 | 5.08 | | | 2.57 | |
| 9 | cat1 (0004)-sucD (0035) | 4hbd (0009) | 2.07 | 5.04 | 0.600 | 1.85 | 0.01 | |
| 10 | cat1 (0004)-sucD (0035) | 4hbd (0036) | 2.08 | 5.40 | 0.694 | 1.73 | 0.41 | |
| 11 | cat1 (0004)-sucD (0035) | 4hbd (0010n) | 2.44 | 4.73 | 0.679 | 2.28 | 0.37 | |
| 12 | cat1 (0004)-sucD (0008) | 4hbd (0009) | 1.08 | 3.99 | 0.572 | −0.01 | 0.02 | |
| 13 | cat1 (0004)-sucD (0008) | 4hbd (0036) | 0.77 | 2.60 | 0.898 | −0.01 | 0.04 | |
| 14 | cat1 (0004)-sucD (0008) | 4hbd (0010n) | 0.63 | 2.47 | 0.776 | 0.00 | 0.00 | |
| 15 | | cat2 (0034) | 2.56 | 7.86 | | | | 1.283 |
| 16 | | cat2(0034)-4hbd(0036) | 3.13 | 8.04 | | | 24.86 | 0.993 |
| 17 | | cat2(0034)-4hbd(0010n) | 2.38 | 7.03 | | | 7.45 | 0.675 |
| 18 | | 4hbd(0036)-cat2(0034) | 2.69 | 8.26 | | | 2.15 | 7.490 |
| 19 | | 4hbd(0010n)-cat2(0034) | 2.44 | 6.59 | | | 0.59 | 4.101 |

Genes expressed from Plac on pZE13, a high-copy plasmid with colE1 origin and ampicillin resistance. Gene identification numbers are as given in Table 6
Genes expressed from Plac on pZA33, a medium-copy plasmid with pACYC origin and chloramphenicol resistance.
(c) Cell protein given as mg protein per mL extract.

[0468] Recombinant strains containing genes in the 4-HB pathway were then evaluated for the ability to produce 4-HB in vivo from central metabolic intermediates. Cells were grown anaerobically in LB medium to OD600 of approximately 0.4, then induced with 1 mM IPTG. One hour later, sodium succinate was added to 10 mM, and samples taken for analysis following an additional 24 and 48 hours. 4-HB in the culture broth was analyzed by GC-MS as described below. The results indicate that the recombinant strain can produce over 2 mM 4-HB after 24 hours, compared to essentially zero in the control strain (Table 8).

TABLE 8
Production of 4-HB from succinate in E. coli strains harboring plasmids expressing various
combinations of 4-HB pathway genes.

| | | | | 24 Hours | | | 48 Hours | | |
|---|---|---|---|---|---|---|---|---|---|
| | | | | | 4HB, | 4HB | | 4HB, | 4HB |
| Sample # | Host Strain | pZE13 | pZA33 | OD600 | μM | norm. (a) | OD600 | μM | norm. (a) |
| 1 | MG1655 laclq | cat1 (0004)-sucD (0035) | 4hbd (0009) | 0.47 | 487 | 1036 | 1.04 | 1780 | 1711 |
| 2 | MG1655 laclq | cat1 (0004)-sucD (0035) | 4hbd (0027) | 0.41 | 111 | 270 | 0.99 | 214 | 217 |
| 3 | MG1655 laclq | cat1 (0004)-sucD (0035) | 4hbd (0036) | 0.47 | 863 | 1835 | 0.48 | 2152 | 4484 |
| 4 | MG1655 laclq | cat1 (0004)-sucD (0035) | 4hbd (0010n) | 0.46 | 956 | 2078 | 0.49 | 2221 | 4533 |
| 5 | MG1655 laclq | cat1 (0004)-sucD (0008) | 4hbd (0009) | 0.38 | 493 | 1296 | 0.37 | 1338 | 3616 |
| 6 | MG1655 laclq | cat1 (0004)-sucD (0008) | 4hbd (0027) | 0.32 | 26 | 81 | 0.27 | 87 | 323 |
| 7 | MG1655 laclq | cat1 (0004)-sucD (0008) | 4hbd (0036) | 0.24 | 506 | 2108 | 0.31 | 1448 | 4672 |
| 8 | MG1655 laclq | cat1 (0004)-sucD (0008) | 4hbd (0010n) | 0.24 | 78 | 324 | 0.56 | 233 | 416 |
| 9 | MG1655 laclq gabD | cat1 (0004)-sucD (0035) | 4hbd (0009) | 0.53 | 656 | 1237 | 1.03 | 1643 | 1595 |
| 10 | MG1655 laclq gabD | cat1 (0004)-sucD (0035) | 4hbd (0027) | 0.44 | 92 | 209 | 0.98 | 214 | 218 |
| 11 | MG1655 laclq gabD | cat1 (0004)-sucD (0035) | 4hbd (0036) | 0.51 | 1072 | 2102 | 0.97 | 2358 | 2431 |
| 12 | MG1655 laclq gabD | cat1 (0004)-sucD (0035) | 4hbd (0010n) | 0.51 | 981 | 1924 | 0.97 | 2121 | 2186 |
| 13 | MG1655 laclq gabD | cat1 (0004)-sucD (0008) | 4hbd (0009) | 0.35 | 407 | 1162 | 0.77 | 1178 | 1530 |
| 14 | MG1655 laclq gabD | cat1 (0004)-sucD (0008) | 4hbd (0027) | 0.51 | 19 | 36 | 1.07 | 50 | 47 |
| 15 | MG1655 laclq gabD | cat1 (0004)-sucD (0008) | 4hbd (0036) | 0.35 | 584 | 1669 | 0.78 | 1350 | 1731 |
| 16 | MG1655 laclq gabD | cat1 (0004)-sucD (0008) | 4hbd (0010n) | 0.32 | 74 | 232 | 0.82 | 232 | 283 |
| 17 | MG1655 laclq | vector only | vector only | 0.8 | 1 | 2 | 1.44 | 3 | 2 |
| 18 | MG1655 laclq gabD | vector only | vector only | 0.89 | 1 | 2 | 1.41 | 7 | 5 |

(a) Normalized 4-HB concentration, μM/OD600 units

[0469] An alternate to using a CoA transferase (cat1) to produce succinyl-CoA from succinate is to use the native E. coli sucCD genes, encoding succinyl-CoA synthetase. This gene cluster was cloned onto pZE13 along with candidate genes for the remaining steps to 4-HB to create pZE13-0038-0035-0036.

[0470] Production of 4-HB from Glucose. Although the above experiments demonstrate a functional pathway to 4-HB from a central metabolic intermediate (succinate), an industrial process would require the production of chemicals from low-cost carbohydrate feedstocks such as glucose or sucrose. Thus, the next set of experiments was aimed to determine whether endogenous succinate produced by the cells during growth on glucose could fuel the 4-HB pathway. Cells were grown anaerobically in M9 minimal medium (6.78 g/L Na₂HPO₄, 3.0 g/L KH₂PO₄, 0.5 g/L NaCl, 1.0 g/L NH₄Cl, 1 mM MgSO₄, 0.1 mM CaCl₂) supplemented with 20 g/L glucose, 100 mM 3-(N-morpholino)propanesulfonic acid (MOPS) to improve the buffering capacity, 10 μg/mL thiamine, and the appropriate antibiotics. 0.25 mM IPTG was added when OD600 reached approximately 0.2, and samples taken for 4-HB analysis every 24 hours following induction. In all cases 4-HB plateaued after 24 hours, with a maximum of about 1 mM in the best strains (FIG. 3a), while the succinate concentration continued to rise (FIG. 3b). This indicates that the supply of succinate to the pathway is likely not limiting, and that the bottleneck may be in the activity of the enzymes themselves or in NADH availability. 0035 and 0036 are clearly the best gene candidates for CoA-dependent succinic semialdehyde dehydrogenase and 4-HB dehydrogenase, respectively. The elimination of one or both of the genes encoding known (gabD) or putative (aldA) native succinic semialdehyde dehydrogenases had little effect on performance. Finally, it should be noted that the cells grew to a much lower OD in the 4-HB-producing strains than in the controls (FIG. 3c).

[0471] An alternate pathway for the production of 4-HB from glucose is via α-ketoglutarate. We explored the use of an α-ketoglutarate decarboxylase from Mycobacterium tuberculosis Tian et al., Proc. Natl. Acad. Sci. USA 102:10670-10675 (2005) to produce succinic semialdehyde directly from α-ketoglutarate (step 8 in FIG. 1). To demonstrate that this gene (0032) was functional in vivo, we expressed it on pZE13 in the same host as 4-HB dehydrogenase (gene 0036) on pZA33. This strain was capable of producing over 1.0 mM 4-HB within 24 hours following induction with 1 mM IPTG (FIG. 4). Since this strain does not express a CoA-dependent succinic semialdehyde dehydrogenase, the possibility of succinic semialdehyde production via succinyl-CoA is eliminated. It is also possible that the native genes responsible for producing succinic semialdehyde could function in this pathway (steps 4 and 5 in FIG. 1); however, the amount of 4-HB produced when the pZE13-0032 plasmid was left out of the host is the negligible.

[0472] Production of BDO from 4-HB. The production of BDO from 4-HB required two reduction steps, catalyzed by dehydrogenases. Alcohol and aldehyde dehydrogenases (ADH and ALD, respectively) are NAD+/H and/or NADP+/H-dependent enzymes that together can reduce a carboxylic acid group on a molecule to an alcohol group, or in reverse, can perform the oxidation of an alcohol to a carboxylic acid. This biotransformation has been demonstrated in wild-type Clostridium acetobutylicum (Jewell et al., Current Microbiology, 13:215-19 (1986)), but neither the enzymes responsible nor the genes responsible were identified. In addition, it is not known whether activation to 4-HB-CoA is first required (step 9 in FIG. 1), or if the aldehyde dehydrogenase (step 12) can act directly on 4-HB. We developed a list of candidate enzymes from C. acetobutylicum and related organisms based on known activity with the non-hydroxylated analogues to 4-HB and pathway intermediates, or by similarity to these characterized genes (Table 6). Since some of the candidates are multifunctional dehydrogenases, they could potentially catalyze both the NAD(P)H-dependent reduction of the acid (or CoA-derivative) to the aldehyde, and of the aldehyde to the alcohol. Before beginning work with these genes in E. coli, we first validated the result referenced above using C. acetobutylicum ATCC 824. Cells were grown in Schaedler broth (Accumedia, Lansing, Mich.) supplemented with 10 mM 4-HB, in an anaerobic atmosphere of 10% CO₂, 10% H₂, and 80% N₂ at 30° C. Periodic culture samples were taken, centrifuged, and the broth analyzed for BDO by GC-MS as described below. BDO concentrations of 0.1 mM, 0.9 mM, and 1.5 mM were detected after 1 day, 2 days, and 7 days incubation, respectively. No BDO was detected in culture grown without 4-HB addition. To demonstrate that the BDO produced was derived from glucose, we grew the best BDO producing strain MG1655 lacI^{Q} pZE13-0004-0035-0002 pZA33-0034-0036 in M9 minimal medium supplemented with 4 g/L uniformly labeled ¹³C-glucose. Cells were induced at OD of 0.67 with 1 mM IPT (and a sample taken after 24 hours. Analysis of the culture supematant was performed by mass spectrometry.

[0473] Gene candidates for the 4-HB to BDO conversion pathway were next tested for activity when expressed in the E. coli host MG1655 lacI^{Q}. Recombinant strains containing each gene candidate expressed on pZA33 were grown in the presence of 0.25 mM IPTG for four hours at 37° C. to fully induce expression of the enzyme. Four hours after induction, cells were harvested and assayed for ADH and ALD activity as described above. Since 4-HB-CoA and 4-hydroxybutyraldehyde are not available commercially, assays were performed using the non-hydroxylated substrates (Table 9). The ratio in activity between 4-carbon and 2-carbon substrates for C. acetobutylicum adhE2 (0002) and E. coli adhE (0011) were similar to those previously reported in the literature a Atsumi et al., Biochim. Biophys. Acta. 1207:1-11 (1994).

TABLE 9
In vitro enzyme activities in cell extracts from MG1655
lacI^{Q} containing pZA33 expressing gene candidates for
aldehyde and alcohol dehydrogenases. Activities are expressed in
μmol min⁻¹ mg cell protein⁻¹.

| | Aldehyde dehydrogenase | | Alcohol dehydrogenase | |
|---|---|---|---|---|
| | Substrate | | | |
| Gene | Butyryl-CoA | Acetyl-CoA | Butyraldehyde | Acetaldehyde |
| 0002 | 0.0076 | 0.0046 | 0.0264 | 0.0247 |
| 0003n | 0.0060 | 0.0072 | 0.0080 | 0.0075 |
| 0011 | 0.0069 | 0.0095 | 0.0265 | 0.0093 |
| 0013 | N.D. | N.D. | 0.0130 | 0.0142 |
| 0023 | 0.0089 | 0.0137 | 0.0178 | 0.0235 |
| 0025 | 0 | 0.0001 | N.D. | N.D. |
| 0026 | 0 | 0.0005 | 0.0024 | 0.0008 |

N.D., not determined.

[0474] For the BDO production experiments, cat2 from Porphyromonas gingivalis W83 (gene 0034) was included on pZA33 for the conversion of 4-HB to 4-HB-CoA, while the candidate dehydrogenase genes were expressed on pZE13. The host strain was MG1655 lacI^{Q}. Along with the alcohol and aldehyde dehydrogenase candidates, we also tested the ability of CoA-dependent succinic semialdehyde dehydrogenases (sucD) to function in this step, due to the similarity of the substrates. Cells were grown to an OD of about 0.5 in LB medium supplemented with 10 mM 4-HB, induced with 1 mM IPTG and culture broth samples taken after 24 hours and analyzed for BDO as described below. The best BDO production occurred using adhE2 from C. acetobutylicum, sucD from C. kluyveri, or sucD from P. gingivalis (FIG. 5). Interestingly, the absolute amount of BDO produced was higher under aerobic conditions; however, this is primarily due to the lower cell density achieved in anaerobic cultures. When normalized to cell OD, the BDO production per unit biomass is higher in anaerobic conditions (Table 10).

TABLE 10
Absolute and normalized BDO concentrations from cultures of cells
expressing adhE2 from C. acetobutylicum, sucD from C. kluyveri,
or sucD from P. gingivalis (data from experiments 2, 9, and 10
in FIG. 3), as well as the negative control (experiment 1).

| Gene | | BDO | OD | |
|---|---|---|---|---|
| expressed | Conditions | (μM) | (600 nm) | BDO/OD |
| none | Aerobic | 0 | 13.4 | 0 |
| none | Microaerobic | 0.5 | 6.7 | 0.09 |
| none | Anaerobic | 2.2 | 1.26 | 1.75 |
| 0002 | Aerobic | 138.3 | 9.12 | 15.2 |
| 0002 | Microaerobic | 48.2 | 5.52 | 8.73 |
| 0002 | Anaerobic | 54.7 | 1.35 | 40.5 |
| 0008n | Aerobic | 255.8 | 5.37 | 47.6 |
| 0008n | Microaerobic | 127.9 | 3.05 | 41.9 |
| 0008n | Anaerobic | 60.8 | 0.62 | 98.1 |
| 0035 | Aerobic | 21.3 | 14.0 | 1.52 |
| 0035 | Microaerobic | 13.1 | 4.14 | 3.16 |
| 0035 | Anaerobic | 21.3 | 1.06 | 20.1 |

[0475] As discussed above, it may be advantageous to use a mute for converting 4-HB to 4-HB-CoA that does not generate acetate as a byproduct. To this aim, we tested the use of phosphotransbutyrylase (ptb) and butyrate kinase (bk) from C. acetobutylicum to carry out this conversion via steps 10 and 11 in FIG. 1. The native ptb/bk operon from C. acetobutylicum (genes 0020 and 0021) was cloned and expressed in pZA33. Extracts from cells containing the resulting construct were taken and assayed for the two enzyme activities as described herein. The specific activity of BK was approximately 65 U/mg, while the specific activity of PTB was approximately 5 U/mg. One unit (U) of activity is defined as conversion of 1 μM substrate in 1 minute at mom temperature. Finally, the construct was tested for participation in the conversion of 4-HB to BDO. Host strains were transformed with the pZA33-0020-0021 construct described and pZE13-0002, and compared to use of cat2 in BDO production using the aerobic procedure used above in FIG. 5. The BK/PTB strain produced 1 mM BDO, compared to 2 mM when using cat2 (Table 11). Interestingly, the results were dependent on whether the host strain contained a deletion in the native adhE gene.

TABLE 11
Absolute and normalized BDO concentrations from cultures of cells
expressing adhE2 from C. acetobutylicum in pZE13 along with
either cat2 from P. gingivalis (0034) or the PTB/BK genes from
C. acetobutylicum on pZA33. Host strains were either MG1655
lacI^{Q} or MG1655 ΔadhE lacI^{Q}.

| | | BDO | OD | |
|---|---|---|---|---|
| Genes | Host Strain | (μM) | (600 nm) | BDO/OD |
| 0034 | MG1655 lacI^{Q} | 0.827 | 19.9 | 0.042 |
| 0020 + 0021 | MG1655 lacI^{Q} | 0.007 | 9.8 | 0.0007 |
| 0034 | MG1655 ΔadhE lacI^{Q} | 2.084 | 12.5 | 0.166 |
| 0020 + 0021 | MG1655 ΔadhE lacI^{Q} | 0.975 | 18.8 | 0.052 |

[0476] Production of BDO from Glucose. The final step of pathway corroboration is to express both the 4-HB and BDO segments of the pathway in E. coli and demonstrate production of BDO in glucose minimal medium. New plasmids were constructed so that all the required genes fit on two plamids. In general, cat1, adhE, and sucD genes were expressed from pZE13, and cat2 and 4-HBd were expressed from pZA33. Various combinations of gene source and gene order were tested in the MG1655 lacI^{Q} background. Cells were grown anaerobically in M9 minimal medium (6.78 g/L Na₂HPO₄, 3.0 g/L KH₂PO₄, 0.5 g/L NaCl, 1.0 g/L NH₄Cl, 1 mM MgSO₄, 0.1 mM CaCl₂) supplemented with 20 g/L glucose, 100 mM 3-(N-morpholino)propanesulfonic acid (MOPS) to improve the buffering capacity, 10 μg/mL thiamine, and the appropriate antibiotics. 0.25 mM IPTG was added approximately 15 hours following inoculation, and culture supernatant samples taken for BDO, 4-HB, and succinate analysis 24 and 48 hours following induction. The production of BDO appeared to show a dependency on gene order (Table 12). The highest BDO production, over 0.5 mM, was obtained with cat2 expressed first, followed by 4-HBd on pZA33, and cat1 followed by P. gingivalis sucD on pZE13. The addition of C. acetobutylicum adhE2 in the last position on pZE13 resulted in slight improvement. 4-HB and succinate were also produced at higher concentrations.

TABLE 12
Production of BDO, 4-HB, and succinate in recombinant E. coli strains expressing combinations of
BDO pathway genes, grown in minimal medium supplemented with 20 g/L glucose. Concentrations are given in mM.

| | | | | 24 Hours | | | | 48 Hours | | | |
|---|---|---|---|---|---|---|---|---|---|---|---|
| | | | Induction | OD600 | | | | OD600 | | | |
| Sample | pZE13 | pZA33 | OD | nm | Su | 4HB | BDO | nm | Su | 4HB | BDO |
| 1 | cat1(0004)-sucD(0035) | 4hbd (0036)-cat2(0034) | 0.92 | 1.29 | 5.44 | 1.37 | 0.240 | 1.24 | 6.42 | 1.49 | 0.280 |
| 2 | cat1(0004)-sucD(0008N) | 4hbd (0036)-cat2(0034) | 0.36 | 1.11 | 6.90 | 1.24 | 0.011 | 1.06 | 7.63 | 1.33 | 0.011 |
| 3 | adhE(0002)-cat1(0004)- | 4hbd (0036)-cat2(0034) | 0.20 | 0.44 | 0.34 | 1.84 | 0.050 | 0.60 | 1.93 | 2.67 | 0.119 |
| | sucD(0035) | | | | | | | | | | |
| 4 | cat1(0004)-sucD(0035)- | 4hbd (0036)-cat2(0034) | 1.31 | 1.90 | 9.02 | 0.73 | 0.073 | 1.95 | 9.73 | 0.82 | 0.077 |
| | adhE(0002) | | | | | | | | | | |
| 5 | adhE(0002)-cat1(0004)- | 4hbd (0036)-cat2(0034) | 0.17 | 0.45 | 1.04 | 1.04 | 0.008 | 0.94 | 7.13 | 1.02 | 0.017 |
| | sucD(0008N) | | | | | | | | | | |
| 6 | cat1(0004)- | 4hbd (0036)-cat2(0034) | 1.30 | 1.77 | 10.47 | 0.25 | 0.004 | 1.80 | 11.49 | 0.28 | 0.003 |
| | sucD(0008N)- | | | | | | | | | | |
| | adhE(0002) | | | | | | | | | | |
| 7 | cat1(0004)-sucD(0035) | cat2(0034)-4hbd(0036) | 1.09 | 1.29 | 5.63 | 2.15 | 0.461 | 1.38 | 6.66 | 2.30 | 0.520 |
| 8 | cat1(0004)-sucD(0008N) | cat2(0034)-4hbd(0036) | 1.81 | 2.01 | 11.28 | 0.02 | 0.000 | 2.24 | 11.13 | 0.02 | 0.000 |
| 9 | adhE(0002)-cat1(0004)- | cat2(0034)-4hbd(0036) | 0.24 | 1.99 | 2.02 | 2.32 | 0.106 | 0.89 | 4.85 | 2.41 | 0.186 |
| | sucD(0035) | | | | | | | | | | |
| 10 | cat1(0004)-sucD(0035)- | cat2(0034)-4hbd(0036) | 0.98 | 1.17 | 5.30 | 2.08 | 0.569 | 1.33 | 6.15 | 2.14 | 0.640 |
| | adhE(0002) | | | | | | | | | | |
| 11 | adhE(0002)-cat1(0004)- | cat2(0034)-4hbd(0036) | 0.20 | 0.53 | 1.38 | 2.30 | 0.019 | 0.91 | 8.10 | 1.49 | 0.034 |
| | sucD(0008N) | | | | | | | | | | |
| 12 | cat1(0004)- | cat2(0034)-4hbd(0036) | 2.14 | 2.73 | 12.07 | 0.16 | 0.000 | 3.10 | 11.79 | 0.17 | 0.002 |
| | sucD(0008N)- | | | | | | | | | | |
| | adhE(0002) | | | | | | | | | | |
| 13 | vector only | vector only | 2.11 | 2.62 | 9.03 | 0.01 | 0.000 | 3.00 | 12.05 | 0.01 | 0.000 |

[0477] Analysis of BDO, 4-HB and succinate by GCMS. BDO, 4-HB and succinate in fermentation and cell culture samples were derivatized by silylation and quantitatively analyzed by GCMS using methods adapted from literature reports ((Simonov et al., J. Anal Chem. 59:965-971 (2004)). The developed method demonstrated good sensitivity down to 1 μM, linearity up to at least 25 mM, as well as excellent selectivity and reproducibility.

[0478] Sample preparation was performed as follows: 100 μL filtered (0.2 nm or 0.45 μm syringe filters) samples, e.g. fermentation broth, cell culture or standard solutions, were dried down in a Speed Vac Concentrator (Savant SVC-100H) for approximately 1 hour at ambient temperature, followed by the addition of 20 μL 10 mM cyclohexanol solution, as an internal standard, in dimethylformamide. The mixtures were vortexed and sonicated in a water bath (Branson 3510) for 15 min to ensure homogeneity. 100 μL silylation derivatization reagent, N,O-bis(trimethylsilyl)triflouro-acetamide (BSTFA) with 1% trimethylchlorosilane, was added, and the mixture was incubated at 70° C. for 30 min. The derivatized samples were centrifuged for 5 min, and the clear solutions were directly injected into GCMS. All the chemicals and reagents were from Sigma-Aldrich, with the exception of BDO which was purchased from J. T. Baker.

[0479] GCMS was performed on an Agilent gas chromatograph 6890N, interfaced to a mass-selective detector (MSD) 5973N operated in electron impact ionization (EI) mode has been used for the analysis. A DB-5MS capillary column (J&W Scientific, Agilent Technologies), 30 m×0.25 mm i.d.×0.25 μm film thickness, was used. The GC was operated in a split injection mode introducing 1 μL of sample at 20:1 split ratio. The injection port temperature was 250° C. Helium was used as a carrier gas, and the flow rate was maintained at 1.0 mL/min. A temperature gradient program was optimized to ensure good resolution of the analytes of interest and minimum matrix interference. The oven was initially held at 80° C. for 1 min, then ramped to 120° C. at 2° C./min, followed by fast ramping to 320° C. at 100° C./min and final hold for 6 min at 320° C. The MS interface transfer line was maintained at 280° C. The data were acquired using ‘lowmass’ MS tune settings and 30-400 m/z mass-range scan. The total analysis time was 29 min including 3 min solvent delay. The retention times corresponded to 5.2, 10.5, 14.0 and 18.2 min for BSTFA-derivatized cyclohexanol, BDO, 4-HB and succinate, respectively. For quantitative analysis, the following specific mass fragments were selected (extracted ion chromatograms): m/z 157 for internal standard cyclohexanol, 116 for BDO, and 147 for both 4-HB and succinate. Standard calibration curves were constructed using analyte solutions in the corresponding cell culture or fermentation medium to match sample matrix as close as possible. GCMS data were processed using Environmental Data Analysis ChemStation software (Agilent Technologies).

[0480] The results indicated that most of the 4-HB and BDO produced were labeled with ¹³C (FIG. 6, right-hand sides). Mass spectra from a parallel culture grown in unlabeled glucose are shown for comparison (FIG. 6, left-hand sides). Note that the peaks seen are for fragments of the derivatized molecule containing different numbers of carbon atoms from the metabolite. The derivatization reagent also contributes some carbon and silicon atoms that naturally-occurring label distribution, so the results are not strictly quantitative.

[0481] Production of BDO from 4-HB using alternate pathways. The various alternate pathways were also tested for BDO production. This includes use of the native E. coli SucCD enzyme to convert succinate to succinyl-CoA (Table 13, rows 2-3), use of α-ketoglutarate decarboxylase in the α-ketoglutarate pathway (Table 13, mw 4), and use of PTB/BK as an alternate means to generate the CoA-derivative of 4HB (Table 13, mw 1). Strains were constructed containing plasmids expressing the genes indicated in Table 13, which encompass these variants. The results show that in all cases, production of 4-HB and BDO occurred (Table 13).

TABLE 13
Production of BDO, 4-HB, and succinate in recombinant E. coli strains
genes for different BDO pathway variants, grown anaerobically in
minimal medium supplemented with 20 g/L glucose, and harvested
24 hours after induction with 0.1 mM IPTG. Concentrations
are given in mM.

| Genes on pZE13 | Genes on pZA33 | Succinate | 4-HB | BDO |
|---|---|---|---|---|
| 0002 + 0004 + 0035 | 0020n-0021n-0036 | 0.336 | 2.91 | 0.230 |
| 0038 + 0035 | 0034-0036 | 0.814 | 2.81 | 0.126 |
| 0038 + 0035 | 0036-0034 | 0.741 | 2.57 | 0.114 |
| 0035 + 0032 | 0034-0036 | 5.01 | 0.538 | 0.154 |

### Example III

### Biosynthesis of 4-Hydroxybutanoic Acid, γ-Butyrolactone and 1,4-Butanediol

[0482] This Example describes the biosynthetic production of 4-hydroxybutanoic acid, γ-butyrolactone and 1,4-butanediol using fermentation and other bioprocesses. See corresponding Example in WO2013/184602.

### Example IV

### Exemplary BDO Pathways

[0483] This example describes exemplary enzymes and corresponding genes for 1,4-butandiol (BDO) synthetic pathways.

[0484] Exemplary BDO synthetic pathways are shown in FIGS. 8-13. The pathways depicted in FIGS. 8-13 are from common central metabolic intermediates to 1,4-butanediol. All transformations depicted in FIGS. 8-13 fall into the 18 general categories of transformations shown in Table 14. Below is described a number of biochemically characterized candidate genes in each category, as described in this and further Examples provided below. Thus, it is understood that a gene for carrying out a specified reaction can be utilized based on any of the disclosures herein, including various Examples, for the same or similar type of reaction. Specifically listed are genes that can be applied to catalyze the appropriate transformations in FIGS. 9-13 when cloned and expressed in a host organism. The top three exemplary genes for each of the key steps in FIGS. 9-13 are described in Tables 15 and 16 herein and in Tables 17-23 in WO2013/184602. Exemplary genes were provided for the pathways depicted in FIG. 8 are described herein.

TABLE 14
Enzyme types required to convert common central metabolic intermediates
into 1,4-butanediol. The first three digits of each label correspond to the
first three Enzyme Commission number digits which denote
the general type of transformation independent of substrate specificity.

| Label | Function |
|---|---|
| 1.1.1.a | Oxidoreductase (ketone to hydroxyl or aldehyde to alcohol) |
| 1.1.1.c | Oxidoreductase (2 step, acyl-CoA to alcohol) |
| 1.2.1.b | Oxidoreductase (acyl-CoA to aldehyde) |
| 1.2.1.c | Oxidoreductase (2-oxo acid to acyl-CoA, decarboxylation) |
| 1.2.1.d | Oxidoreductase (phosphorylating/dephosphorylating) |
| 1.3.1.a | Oxidoreductase operating on CH—CH donors |
| 1.4.1.a | Oxidoreductase operating on amino acids |
| 2.3.1.a | Acyltransferase (transferring phosphate group) |
| 2.6.1.a | Aminotransferase |
| 2.7.2.a | Phosphotransferase, carboxyl group acceptor |
| 2.8.3.a | Coenzyme-A transferase |
| 3.1.2.a | Thiolester hydrolase (CoA specific) |
| 4.1.1.a | Carboxy-lyase |
| 4.2.1.a | Hydro-lyase |
| 4.3.1.a | Ammonia-lyase |
| 5.3.3.a | Isomerase |
| 5.4.3.a | Aminomutase |
| 6.2.1.a | Acid-thiol ligase |

1.1.1.a—Oxidoreductase (Aldehyde to Alcohol or Ketone to Hydroxyl)

[0485] Aldehyde to Alcohol.

[0486] Exemplary genes encoding enzymes that catalyze the conversion of an aldehyde to alcohol, that is, alcohol dehydrogenase or equivalently aldehyde reductase, include alrA encoding a medium-chain alcohol dehydrogenase for C2-C14 (Tani et al. Appl. Environ. Microbiol. 66:5231-5235 (2000)), ADH2 from Saccharomyces cerevisiae (Atsumi et al. Nature 451:86-89 (2008)), yqhD from E. coli which has preference for molecules longer than C(3) (Sulzenbacher et al. Journal of Molecular Biology 342:489-502 (2004)), and bdh I and bdh II from C. acetobutylicum which converts butyryaldehyde into butanol (Walter et al. Journal of Bacteriology 174:7149-7158 (1992)). The protein sequences for each of these exemplary gene products, if available, can be found using the following GenBank accession numbers:

| Gene | Accession No. | GI No. | Organism |
|---|---|---|---|
| alrA | BAB12273.1 | 9967138 | Acinetobacter sp. Strain M-1 |
| ADH2 | NP_014032.1 | 6323961 | Saccharymyces cerevisiae |
| yqhD | NP_417484.1 | 16130909 | Escherichia coli |
| bdh I | NP_349892.1 | 15896543 | Clostridium acetobutylicum |
| bdh II | NP_349891.1 | 15896542 | Clostridium acetobutylicum |

[0487] Enzymes exhibiting 4-hydroxybutyrate dehydrogenase activity (EC 1.1.1.61) also fall into this category. Such enzymes have been characterized in Ralstonia eutropha (Bravo et al. J. Forensic Sci. 49:379-387 (2004), Clostridium kluyveri (Wolff et al. Protein Expr. Purif. 6:206-212 (1995)) and Arabidopsis thaliana (Breitkreuz et al. J. Biol. Chem. 278:41552-41556 (2003)).

| Gene | Accession No. | GI No. | Organism |
|---|---|---|---|
| 4hbd | YP_726053.1 | 113867564 | Ralstonia eutropha H16 |
| 4hbd | L21902.1 | 146348486 | Clostridium kluyveri DSM 555 |
| 4hbd | Q94B07 | 75249805 | Arabidopsis thaliana |

[0488] Another exemplary enzyme is 3-hydroxyisobutyrate dehydrogenase which catalyzes the reversible oxidation of 3-hydroxyisobutyrate to methylmalonate semialdehyde. This enzyme participates in valine, leucine and isoleucine degradation and has been identified in bacteria, eukaryotes, and mammals. The enzyme encoded by P84067 from Thermus thermophilus HB8 has been structurally characterized (Lokanath et al. J Mol Biol 352:905-17 (2005)). The reversibility of the human 3-hydroxyisobutyrate dehydrogenase was demonstrated using isotopically-labeled substrate (Manning et al. Biochem J 231:481-484 (1985)). Additional genes encoding this enzyme include 3hidh in Homo sapiens (Hawes et al. Methods Enzymol. 324:218-228 (2000)) and Oryctolagus cuniculus (Chowdhury et al. Biosci. Biotechnol Biochem. 60:2043-2047 (1996); Hawes et al. Methods Enzymol. 324:218-228 (2000)), mmsb in Pseudomonas aeruginosa, and dhat in Pseudomonas putida (Aberhart et al. J Chem. Soc. [Perkin 1] 6:1404-1406 (1979); Chowdhury et al. Biosci. Biotechnol Biochem. 67:438-441 (2003); Chowdhury et al. Biosci. Biotechnol Biochem. 60:2043-2047 (1996)).

| Gene | Accession No. | GI No. | Organism |
|---|---|---|---|
| P84067 | P84067 | 75345323 | Thermus thermophilus |
| mmsb | P28811.1 | 127211 | Pseudomonas aeruginosa |
| dhat | Q59477.1 | 2842618 | Pseudomonas putida |
| 3hidh | P31937.2 | 12643395 | Homo sapiens |
| 3hidh | P32185.1 | 416872 | Oryctolagus cuniculus |

[0489] Several 3-hydroxyisobutyrate dehydrogenase enzymes have also been shown to convert malonic semialdehyde to 3-hydroxyproprionic acid (3-HP). Three gene candidates exhibiting this activity are mmsB from Pseudomonas aeruginosa PAO1(62), mmsB from Pseudomonas putida KT2440 (Liao et al., US Publication 2005/0221466) and mmsB from Pseudomonas putida E23 (Chowdhury et al., Biosci. Biotechnol. Biochem. 60:2043-2047 (1996)). An enzyme with 3-hydroxybutyrate dehydrogenase activity in Alcaligenes faecalis M3A has also been identified (Gokam et al., U.S. Pat. No. 7,393,676; Liao et al., US Publication No. 2005/0221466). Additional gene candidates from other organisms including Rhodobacter spaeroides can be inferred by sequence similarity.

| Gene | Accession No. | GI No. | Organism |
|---|---|---|---|
| mmsB | AAA25892.1 | 151363 | Pseudomonas aeruginosa |
| mmsB | NP_252259.1 | 15598765 | Pseudomonas aeruginosa PAO1 |
| mmsB | NP_746775.1 | 26991350 | Pseudomonas putida KT2440 |
| mmsB | JC7926 | 60729613 | Pseudomonas putida E23 |
| orfB1 | AAL26884 | 16588720 | Rhodobacter spaeroides |

[0490] The conversion of malonic semialdehyde to 3-HP can also be accomplished by two other enzymes: NADH-dependent 3-hydroxypropionate dehydrogenase and NADPH-dependent malonate semialdehyde reductase. An NADH-dependent 3-hydroxypropionate dehydrogenase is thought to participate in beta-alanine biosynthesis pathways from propionate in bacteria and plants (Rathinasabapathi, B. Journal of Plant Pathology 159:671-674 (2002); Stadtman, E. R. J. Am. Chem. Soc. 77:5765-5766 (1955)). This enzyme has not been associated with a gene in any organism to date. NADPH-dependent malonate semialdehyde reductase catalyzes the reverse reaction in autotrophic CO₂-fixing bacteria. Although the enzyme activity has been detected in Metallosphaera sedula, the identity of the gene is not known (Alber et al. J. Bacteriol 188:8551-8559 (2006)).

[0491] Ketone to Hydroxyl.

[0492] There exist several exemplary alcohol dehydrogenases that convert a ketone to a hydroxyl functional group. Two such enzymes from E. coli are encoded by malate dehydrogenase (mdh) and lactate dehydrogenase (ldhA). In addition, lactate dehydrogenase from Ralstonia eutropha has been shown to demonstrate high activities on substrates of various chain lengths such as lactate, 2-oxobutyrate, 2-oxopentanoate and 2-oxoglutarate (Steinbuchel and Schlegel, Eur. J. Biochem. 130:329-334 (1983)). Conversion of alpha-ketoadipate into alpha-hydroxyadipate can be catalyzed by 2-ketoadipate reductase, an enzyme reported to be found in rat and in human placenta (Soda et al. Arch. Biochem. Biophys. 176:610-620 (1976); Suda et al. Biochem. Biophys. Res. Commun. 77:586-591 (1977)). An additional candidate for this step is the mitochondrial 3-hydroxybutyrate dehydrogenase (bdh) from the human heart which has been cloned and characterized (Marks et al. J. Biol. Chem. 267:15459-15463 (1992)). This enzyme is a dehydrogenase that operates on a 3-hydroxyacid. Another exemplary alcohol dehydrogenase converts acetone to isopropanol as was shown in C. beijerinckii (Ismaiel et al. J. Bacteriol. 175:5097-5105 (1993)) and T. brockii (Lamed et al. Biochem. J. 195:183-190 (1981); Peretz and Burstein Biochemistry 28:6549-6555 (1989)).

| Gene | Accession No. | GI No. | Organism |
|---|---|---|---|
| mdh | AAC76268.1 | 1789632 | Escherichia coli |
| ldhA | NP_415898.1 | 16129341 | Escherichia coli |
| ldh | YP_725182.1 | 113866693 | Ralstonia eutropha |
| bdh | AAA58352.1 | 177198 | Homo sapiens |
| adh | AAA23199.2 | 60592974 | Clostridium beijerinckii NRRL |
| | | | B593 |
| adh | P14941.1 | 113443 | Thermoanaerobacter brockii |
| | | | HTD4 |

[0493] Exemplary 3-hydroxyacyl dehydrogenases which convert acetoacetyl-CoA to 3-hydroxybutyryl-CoA include hbd from C. acetobutylicum (Boynton et al. Journal of Bacteriology 178:3015-3024 (1996)), hbd from C. beijerinckii (Colby et al. Appl Environ. Microbiol 58:3297-3302 (1992)), and a number of similar enzymes from Metallosphaera sedula (Berg et al. Archaea. Science 318:1782-1786 (2007)).

| Gene | Accession No. | GI No. | Organism |
|---|---|---|---|
| hbd | NP_349314.1 | 15895965 | Clostridium |
| | | | acetobutylicum |
| hbd | AAM14586.1 | 20162442 | Clostridium beijerinckii |
| Msed_1423 | YP_001191505 | 146304189 | Metallosphaera sedula |
| Msed_0399 | YP_001190500 | 146303184 | Metallosphaera sedula |
| Msed_0389 | YP_001190490 | 146303174 | Metallosphaera sedula |
| Msed_1993 | YP_001192057 | 146304741 | Metallosphaera sedula |

1.1.1.c—Oxidoredutase (2 Step, Acyl-CoA to Alcohol)

[0494] Exemplary 2-step oxidoreductases that convert an acyl-CoA to alcohol include those that transform substrates such as acetyl-CoA to ethanol (for example, adhE from E. coli (Kessler et al. FEBS. Lett. 281:59-63 (1991)) and butyryl-CoA to butanol (for example, adhE2 from C. acetobutylicum (Fontaine et al. J. Bacteriol. 184:821-830 (2002)). In addition to reducing acetyl-CoA to ethanol, the enzyme encoded by adhE in Leuconostoc mesenteroides has been shown to oxide the branched chain compound isobutyraldehyde to isobutyryl-CoA (Kazahaya et al. J. Gen. Appl. Microbiol. 18:43-55 (1972); Koo et al. Biotechnol Lett. 27:505-510 (2005)).

| Gene | Accession No. | GI No. | Organism |
|---|---|---|---|
| adhE | NP_415757.1 | 16129202 | Escherichia coli |
| adhE2 | AAK09379.1 | 12958626 | Clostridium acetobutylicum |
| adhE | AAV66076.1 | 55818563 | Leuconostoc mesenteroides |

[0495] Another exemplary enzyme can convert malonyl-CoA to 3-HP An NADPH-dependent enzyme with this activity has characterized in Chloroflexus aurantiacus where it participates in the 3-hydroxypropionate cycle (Hugler et al., J. Bacteriol. 184:2404-2410 (2002); Strauss and Fuchs, Eur. J. Biochem. 215:633-643 (1993)). This enzyme, with a mass of 300 kDa, is highly substrate-specific and shows little sequence similarity to other known oxidoreductases (Hugler et al., J. Bacteriol. 184:2404-2410 (2002)). No enzymes in other organisms have been shown to catalyze this specific reaction; however there is bioinformatic evidence that other organisms may have similar pathways (Klatt et al., Environ. Microbiol. 9:2067-2078 (2007)). Enzyme candidates in other organisms including Roseiflexus castenholzii, Erythrobacter sp. NAP1 and marine gamma proteobacterium HTCC2080 can be inferred by sequence similarity

| Gene | Accession No. | GI No. | Organism |
|---|---|---|---|
| mcr | AAS20429.1 | 42561982 | Chloroflexus |
| | | | aurantiacus |
| Rcas_2929 | YP_001433009.1 | 156742880 | Roseiflexus |
| | | | castenholzii |
| NAP1_02720 | ZP_01039179.1 | 85708113 | Erythrobacter |
| | | | sp. NAP1 |
| MGP2080_00535 | ZP_01626393.1 | 119504313 | marine gamma |
| | | | proteobacterium |
| | | | HTCC2080 |

[0496] Longer chain acyl-CoA molecules can be reduced by enzymes such as the jojoba (Simmondsia chinensis) FAR which encodes an alcohol-forming fatty acyl-CoA reductase. Its overexpression in E. coli resulted in FAR activity and the accumulation of fatty alcohol (Metz et al. Plant Physiology 122:635-644) 2000)).

| Gene | Accession No. | GI No. | Organism |
|---|---|---|---|
| FAR | AAD38039.1 | 5020215 | Simmondsia chinensis |

1.2.1.b—Oxidoreductase (acyl-CoA to aldehyde)

[0497] Several acyl-CoA dehydrogenases are capable of reducing an acyl-CoA to its corresponding aldehyde. Exemplary genes that encode such enzymes include the Acinetobacter calcoaceticus acyl encoding a fatty acyl-CoA reductase (Reiser and Somerville, J. Bacteriology 179:2969-2975 (1997)), the Acinetobacter sp. M-1 fatty acyl-CoA reductase (Ishige et al. Appl. Environ. Microbiol. 68:1192-1195 (2002)), and a CoA- and NADP-dependent succinate semialdehyde dehydrogenase encoded by the sucD gene in Clostridium kluyveri (Sohling and Gottschalk J Bacteriol 178:871-80 (1996); Sohling and Gottschalk J. Bacteriol. 178:871-880 (1996)). SucD of P. gingivalis is another succinate semialdehyde dehydrogenase (Takahashi et al. J. Bactetiol. 182:4704-4710 (2000)). The enzyme acylating acetaldehyde dehydrogenase in Pseudomonas sp, encoded by bphG, is yet another as it has been demonstrated to oxidize and acylate acetaldehyde, propionaldehyde, butyraldehyde, isobutyraldehyde and formaldehyde (Powlowski et al. J Bacteriol. 175:377-385 (1993)).

| Gene | Accession No. | GI No. | Organism |
|---|---|---|---|
| acr1 | YP_047869.1 | 50086359 | Acinetobacter calcoaceticus |
| acr1 | AAC45217 | 1684886 | Acinetobacter baylyi |
| acr1 | BAB85476.1 | 18857901 | Acinetobacter sp. Strain M-1 |
| sucD | P38947.1 | 730847 | Clostridium kluyveri |
| sucD | NP_904963.1 | 34540484 | Porphyromonas gingivalis |
| bphG | BAA03892.1 | 425213 | Pseudomonas sp |

[0498] An additional enzyme type that converts an acyl-CoA to its corresponding aldehyde is malonyl-CoA reductase which transforms malonyl-CoA to malonic semialdehyde. Malonyl-CoA reductase is a key enzyme in autotrophic carbon fixation via the 3-hydroxypropionate cycle in thermoacidophilic archael bacteria (Berg et al. Science 318:1782-1786 (2007); Thauer, R. K. Science 318:1732-1733 (2007)). The enzyme utilizes NADPH as a cofactor and has been characterized in Metallosphaera and Sulfolobus spp (Alber et al. J. Bacteriol. 188:8551-8559 (2006); Hugler et al. J. Bacteriol. 184:2404-2410 (2002)). The enzyme is encoded by Msed_{—}0709 in Metallosphaera sedula (Alber et al. J. Bacteriol. 188:8551-8559 (2006); Berg et al. Science 318:1782-1786 (2007)). A gene encoding a malonyl-CoA reductase from Sulfolobus tokodaii was cloned and heterologously expressed in E. coli (Alber et al. J. Bacteriol. 188:8551-8559 (2006)). Although the aldehyde dehydrogenase functionality of these enzymes is similar to the bifunctional dehydrogenase from Chloroflexus aurantiacus, there is little sequence similarity. Both malonyl-CoA reductase enzyme candidates have high sequence similarity to aspartate-semialdehyde dehydrogenase, an enzyme catalyzing the reduction and concurrent dephosphorylation of aspartyl-4-phosphate to aspartate semialdehyde. Additional gene candidates can be found by sequence homology to proteins in other organisms including Sulfolobus solfataricus and Sulfolobus acidocaldarius.

| Gene | Accession No. | GI No. | Organism |
|---|---|---|---|
| Msed_0709 | YP_001190808.1 | 146303492 | Metallosphaera sedula |
| mcr | NP_378167.1 | 15922498 | Sulfolobus tokodaii |
| asd-2 | NP_343563.1 | 15898958 | Sulfolobus solfataricus |
| Saci_2370 | YP_256941.1 | 70608071 | Sulfolobus |
| | | | acidocaldarius |

1.2.1.c—Oxidoreductase (2-Oxo Acid to Acyl-CoA, Decarboxylation)

[0499] Enzymes in this family include 1) branched-chain 2-keto-acid dehydrogenase, 2) alpha-ketoglutarate dehydrogenase, and 3) the pyruvate dehydrogenase multienzyme complex (PDHC). These enzymes are multi-enzyme complexes that catalyze a series of partial reactions which result in acylating oxidative decarboxylation of 2-keto-acids. Each of the 2-keto-acid dehydrogenase complexes occupies key positions in intermediary metabolism, and enzyme activity is typically tightly regulated (Fries et al. Biochemistry 42:6996-7002 (2003)). The enzymes share a complex but common structure composed of multiple copies of three catalytic components: alpha-ketoacid decarboxylase (E1), dihydrolipoamide acyltransferase (E2) and dihydrolipoamide dehydrogenase (E3). The E3 component is shared among all 2-keto-acid dehydrogenase complexes in an organism, while the E1 and E2 components are encoded by different genes. The enzyme components are present in numerous copies in the complex and utilize multiple cofactors to catalyze a directed sequence of reactions via substrate channeling. The overall size of these dehydrogenase complexes is very large, with molecular masses between 4 and 10 million Da (that is, larger than a ribosome).

[0500] Activity of enzymes in the 2-keto-acid dehydrogenase family is normally low or limited under anaerobic conditions in E. coli. Increased production of NADH (or NADPH) could lead to a redox-imbalance, and NADH itself serves as an inhibitor to enzyme function Engineering efforts have increased the anaerobic activity of the E. coli pyruvate dehydrogenase complex (Kim et al. Appl. Environ. Microbiol. 73:1766-1771 (2007); Kim et al. J. Bacteriol. 190:3851-3858) 2008); Zhou et al. Biotechnol. Lett. 30:335-342 (2008)). For example, the inhibitory effect of NADH can be overcome by engineering an H322Y mutation in the E3 component (Kim et al. J. Bacteriol. 190:3851-3858 (2008)). Structural studies of individual components and how they work together in complex provide insight into the catalytic mechanisms and architecture of enzymes in this family (Aevarsson et al. Nat. Struct. Biol. 6:785-792 (1999); Zhou et al. Proc. Natl. Acad. Sci. U.S.A. 98:14802-14807 (2001)). The substrate specificity of the dehydrogenase complexes varies in different organisms, but generally branched-chain keto-acid dehydrogenases have the broadest substrate range.

[0501] Alpha-ketoglutarate dehydrogenase (AKGD) converts alpha-ketoglutarate to succinyl-CoA and is the primary site of control of metabolic flux through the TCA cycle (Hansford, R. G. Curr. Top. Bioenerg. 10:217-278 (1980)). Encoded by genes sucA, sucB and lpd in E. coli, AKGD gene expression is downregulated under anaerobic conditions and during growth on glucose (Park et al. Mol. Microbiol. 15:473-482 (1995)). Although the substrate range of AKGD is narrow, structural studies of the catalytic core of the E2 component pinpoint specific residues responsible for substrate specificity (Knapp et al. J. Mol. Biol. 280:655-668 (1998)). The Bacillus subtilis AKGD, encoded by odhAB (E1 and E2) and pdhD (E3, shared domain), is regulated at the transcriptional level and is dependent on the carbon source and growth phase of the organism (Resnekov et al. Mol. Gen. Genet. 234:285-296 (1992)). In yeast, the LPD1 gene encoding the E3 component is regulated at the transcriptional level by glucose (Roy and Dawes J. Gen. Microbiol. 133:925-933 (1987)). The E1 component, encoded by KGD1, is also regulated by glucose and activated by the products of HAP2 and HAP3 (Repetto and Tzagoloff Mol. Cell Biol. 9:2695-2705 (1989)). The AKGD enzyme complex, inhibited by products NADH and succinyl-CoA, is well-studied in mammalian systems, as impaired function of has been linked to several neurological diseases (Tretter and dam-Vizi Philos. Trans. R. Soc. Lond B Biol. Sci. 360:2335-2345 (2005)).

| Gene | Accession No. | GI No. | Organism |
|---|---|---|---|
| sucA | NP_415254.1 | 16128701 | Escherichia coli str. K12 substr. |
| | | | MG1655 |
| sucB | NP_415255.1 | 16128702 | Escherichia coli str. K12 substr. |
| | | | MG1655 |
| lpd | NP_414658.1 | 16128109 | Escherichia coli str. K12 substr. |
| | | | MG1655 |
| odhA | P23129.2 | 51704265 | Bacillus subtilis |
| odhB | P16263.1 | 129041 | Bacillus subtilis |
| pdhD | P21880.1 | 118672 | Bacillus subtilis |
| KGD1 | NP_012141.1 | 6322066 | Saccharomyces cerevisiae |
| KGD2 | NP_010432.1 | 6320352 | Saccharomyces cerevisiae |
| LPD1 | NP_116635.1 | 14318501 | Saccharomyces cerevisiae |

[0502] Branched-chain 2-keto-acid dehydrogenase complex (BCKAD), also known as 2-oxoisovalerate dehydrogenase, participates in branched-chain amino acid degradation pathways, converting 2-keto acids derivatives of valine, leucine and isoleucine to their acyl-CoA derivatives and CO₂. The complex has been studied in many organisms including Bacillus subtilis (Wang et al. Eur. J. Biochem. 213:1091-1099 (1993)), Rattus norvegicus (Namba et al. J. Biol. Chem. 244:4437-4447 (1969)) and Pseudomonas putida (Sokatch J. Bacteriol. 148:647-652 (1981)). In Bacillus subtilis the enzyme is encoded by genes pdhD (E3 component), bfmBB (E2 component), bfmBAA and bfmBAB (E1 component) (Wang et al. Eur. J. Biochem. 213:1091-1099 (1993)). In mammals, the complex is regulated by phosphorylation by specific phosphatases and protein kinases. The complex has been studied in rat hepatocites (Chicco et al. J. Biol. Chem. 269:19427-19434 (1994)) and is encoded by genes Bckdha (E1 alpha), Bckdhb (E1 beta), Dbt (E2), and Dld (E3). The E1 and E3 components of the Pseudomonas putida BCKAD complex have been crystallized (Aevarsson et al. Nat. Struct. Biol. 6:785-792 (1999); Mattevi Science 255:1544-1550 (1992)) and the enzyme complex has been studied (Sokatch et al. J. Bacteriol. 148:647-652 (1981)). Transcription of the P. putida BCKAD genes is activated by the gene product of bkdR (Hester et al. Eur. J. Biochem. 233:828-836 (1995)). In some organisms including Rattus norvegicus (Paxton et al. Biochem. J. 234:295-303 (1986)) and Saccharomyces cerevisiae (Sinclair et al. Biochem. Mol. Biol. Int. 31:911-922 (1993)), this complex has been shown to have a broad substrate range that includes linear oxo-acids such as 2-oxobutanoate and alpha-ketoglutarate, in addition to the branched-chain amino acid precursors. The active site of the bovine BCKAD was engineered to favor alternate substrate acetvl-CoA (Mena and Chuang, Biochemistry 33:12879-12885 (199411.

| Gene | Accession No. | GI No. | Organism |
|---|---|---|---|
| bfmBB | NP_390283.1 | 16079459 | Bacillus subtilis |
| bfmBAA | NP_390285.1 | 16079461 | Bacillus subtilis |
| bfmBAB | NP_390284.1 | 16079460 | Bacillus subtilis |
| pdhD | P21880.1 | 118672 | Bacillus subtilis |
| lpdV | P09063.1 | 118677 | Pseudomonas putida |
| bkdB | P09062.1 | 129044 | Pseudomonas putida |
| bkdA1 | NP_746515.1 | 26991090 | Pseudomonas putida |
| bkdA2 | NP_746516.1 | 26991091 | Pseudomonas putida |
| Bckdha | NP_036914.1 | 77736548 | Rattus norvegicus |
| Bckdhb | NP_062140.1 | 158749538 | Rattus norvegicus |
| Dbt | NP_445764.1 | 158749632 | Rattus norvegicus |
| Dld | NP_955417.1 | 40786469 | Rattus norvegicus |

[0503] The pyruvate dehydrogenase complex, catalyzing the conversion of pyruvate to acetyl-CoA, has also been extensively studied. In the E. coli enzyme, specific residues in the E1 component are responsible for substrate specificity (Bisswanger, H. J Biol Chem. 256:815-822 (1981); Bremer, J. Eur. J Biochem. 8:535-540 (1969); Gong et al. J. Biol Chem. 275:13645-13653 (2000)). As mentioned previously, enzyme engineering efforts have improved the E. coli PDH enzyme activity under anaerobic conditions (Kim et al. Appl. Environ. Microbiol. 73:1766-1771(2007); Kim J. Bacteriol. 190:3851-3858 (2008); Zhou et al. Biotechnol. Lett. 30:335-342 (2008)). In contrast to the E. coli PDH, the B. subtilis complex is active and required for growth under anaerobic conditions (Nakano J. Bacteriol. 179:6749-6755 (1997)). The Klebsiella pneumoniae PDH, characterized during growth on glycerol, is also active under anaerobic conditions (Menzel et al. J. Biotechnol. 56:135-142 (1997)). Crystal structures of the enzyme complex from bovine kidney (Zhou et al. Proc. Natl. Acad. Sci. U.S.A. 98:14802-14807 (2001)) and the E2 catalytic domain from Azotobacter vinelandii are available (Mattevi et al. Science 255:1544-1550 (1992)). Some mammalian PDH enzymes complexes can react on alternate substrates such as 2-oxobutanoate, although comparative kinetics of Rattus norvegicus PDH and BCKAD indicate that BCKAD has higher activity on 2-oxobutanoate as a substrate (Paxton et al. Biochem. J. 234:295-303 (1986)).

| Gene | Accession No. | GI No. | Organism |
|---|---|---|---|
| aceE | NP_414656.1 | 16128107 | Escherichia coli str. |
| | | | K12 substr. MG1655 |
| aceF | NP_414657.1 | 16128108 | Escherichia coli str. |
| | | | K12 substr. MG1655 |
| lpd | NP_414658.1 | 16128109 | Escherichia coli str. |
| | | | K12 substr. MG1655 |
| pdhA | P21881.1 | 3123238 | Bacillus subtilis |
| pdhB | P21882.1 | 129068 | Bacillus subtilis |
| pdhC | P21883.2 | 129054 | Bacillus subtilis |
| pdhD | P21880.1 | 118672 | Bacillus subtilis |
| aceE | YP_001333808.1 | 152968699 | Klebsiella pneumonia |
| | | | MGH78578 |
| aceF | YP_001333809.1 | 152968700 | Klebsiella pneumonia |
| | | | MGH78578 |
| lpdA | YP_001333810.1 | 152968701 | Klebsiella pneumonia |
| | | | MGH78578 |
| Pdha1 | NP_001004072.2 | 124430510 | Rattus norvegicus |
| Pdha2 | NP_446446.1 | 16758900 | Rattus norvegicus |
| Dlat | NP_112287.1 | 78365255 | Rattus norvegicus |
| Dld | NP_955417.1 | 40786469 | Rattus norvegicus |

[0504] As an alternative to the large multienzyme 2-keto-acid dehydrogenase complexes described above, some anaerobic organisms utilize enzymes in the 2-ketoacid oxidoreductase family (OFOR) to catalyze acylating oxidative decarboxylation of 2-keto-acids. Unlike the dehydrogenase complexes, these enzymes contain iron-sulfur clusters, utilize different cofactors, and use ferredoxin or flavodixin as electron acceptors in lieu of NAD(P)H. While most enzymes in this family are specific to pyruvate as a substrate (POR) some 2-keto-acid:ferredoxin oxidoreductases have been shown to accept a broad range of 2-ketoacids as substrates including alpha-ketoglutarate and 2-oxobutanoate (Fukuda and Wakagi Biochim. Biophys. Acta 1597:74-80 (2002); Zhang et al. J. Biochem. 120:587-599 (1996)). One such enzyme is the OFOR from the thermoacidophilic archaeon Sulfolobus tokodaii 7, which contains an alpha and beta subunit encoded by gene ST2300 (Fukuda and Wakagi Biochim. Biophys. Acta 1597:74-80 (2002); Zhang et al. J. Biochem. 120:587-599 (1996)). A plasmid-based expression system has been developed for efficiently expressing this protein in E. coli (Fukuda et al. Eur. J. Biochem. 268:5639-5646 (2001)) and residues involved in substrate specificity were determined (Fukuda and Wakagi Biochim. Biophys. Acta 1597:74-80 (2002)). Two OFORs from Aeropyrum pernix str. K1 have also been recently cloned into E. coli, characterized, and found to react with a broad range of 2-oxoacids (Nishizawa et al. FEBS Lett. 579:2319-2322 (2005)). The gene sequences of these OFOR candidates are available, although they do not have GenBank identifiers assigned to date. There is bioinformatic evidence that similar enzymes are present in all archaea, some anaerobic bacteria and amitochondrial eukarya (Fukuda and Wakagi Biochim. Biophys. Acta 1597:74-80 (2005)). This class of enzyme is also interesting from an energetic standpoint, as reduced ferredoxin could be used to generate NADH by ferredoxin-NAD reductase (Petitdemange et al. Biochim. Biophys. Acta 421:334-337 (1976)). Also, since most of the enzymes are designed to operate under anaerobic conditions, less enzyme engineering may be required relative to enzymes in the 2-keto-acid dehydrogenase complex family for activity in an anaerobic environment.

| Gene | Accession No. | GI No. | Organism |
|---|---|---|---|
| ST2300 | NP_378302.1 | 15922633 | Sulfolobus tokodaii 7 |

1.2.1.d—Oxidoreductase (Phosphorylating/Dephosphorylating)

[0505] Exemplary enzymes in this class include glyceraldehyde 3-phosphate dehydrogenase which converts glyceraldehyde-3-phosphate into D-glycerate 1,3-bisphosphate (for example, E. coli gapA (Branlant and Branlant Eur. J. Biochem. 150:61-66(1985)), aspartate-semialdehyde dehydrogenase which converts L-aspartate-4-semialdehyde into L-4-aspartyl-phosphate (for example, E. coli asd (Biellmann et al. Eur. J. Biochem. 104:53-58 (1980)), N-acetyl-gamma-glutamyl-phosphate reductase which converts N-acetyl-L-glutamate-5-semialdehyde into N-acetyl-L-glutamyl-5-phosphate (for example, E. coli argC (Parsot et al. Gene 68:275-283 (1988)), and glutamate-5-semialdehyde dehydrogenase which converts L-glutamate-5-semialdehyde into L-glutamyl-5-phospate (for example, E. coli proA (Smith et al. J. Bacteriol. 157:545-551 (1984)).

| Gene | Accession No. | GI No. | Organism |
|---|---|---|---|
| gapA | P0A9B2.2 | 71159358 | Escherichia coli |
| asd | NP_417891.1 | 16131307 | Escherichia coli |
| argC | NP_418393.1 | 16131796 | Escherichia coli |
| proA | NP_414778.1 | 16128229 | Escherichia coli |

1.3.1.a—Oxidoreductase Operating on CH—CH Donors

[0506] An exemplary enoyl-CoA reductase is the gene product of bcd from C. acetobutylicum (Atsumi et al. Metab Eng (2007); Boynton et al. Journal of Bacteriology 178:3015-3024 (1996), which naturally catalyzes the reduction of crotonyl-CoA to butyryl-CoA. Activity of this enzyme can be enhanced by expressing bcd in conjunction with expression of the C. acetobutylicum etfAB genes, which encode an electron transfer flavoprotein. An additional candidate for the enoyl-CoA reductase step is the mitochondrial enoyl-CoA reductase from E. gracilis (Hoffmeister et al. Journal of Biological Chemistry 280:4329-4338 (2005)). A construct derived from this sequence following the removal of its mitochondrial targeting leader sequence was cloned in E. coli resulting in an active enzyme (Hoffmeister et al., supra, (2005)). This approach is well known to those skilled in the art of expressing eukarytotic genes, particularly those with leader sequences that may target the gene product to a specific intracellular compartment, in prokaryotic organisms. A close homolog of this gene, TDE0597, from the prokaryote Treponema denticola represents a third enoyl-CoA reductase which has been cloned and expressed in E. coli (Tucci and Martin FEBS Letters 581:1561-1566 (2007)).

| Gene | Accession No. | GI No. | Organism |
|---|---|---|---|
| bcd | NP_349317.1 | 15895968 | Clostridium acetobutylicum |
| etfA | NP_349315.1 | 15895966 | Clostridium acetobutylicum |
| etfB | NP_349316.1 | 15895967 | Clostridium acetobutylicum |
| TER | Q5EU90.1 | 62287512 | Euglena gracilis |
| TDE0597 | NP_971211.1 | 42526113 | Treponema denticola |

[0507] Exemplary 2-enoate reductase (EC 1.3.1.31) enzymes are known to catalyze the NADH-dependent reduction of a wide variety of α,β-unsaturated carboxylic acids and aldehydes (Rohdich et al. J. Biol. Chem. 276:5779-5787 (2001)). 2-Enoate reductase is encoded by enr in several species of Clostridia (Giesel and Simon Arch Microbiol. 135(1): p. 51-57 (2001) including C. tyrobutyricum, and C. thermoaceticum (now called Moorella thermoaceticum) (Rohdich et al., supra, (2001)). In the recently published genome sequence of C. kluyveri, 9 coding sequences for enoate reductases have been reported, out of which one has been characterized (Seedorf et al. Proc Natl Acad Sci U.S.A. 105(6):2128-33 (2008)). The enr genes from both C. tyrotyricum and C. thermoaceticum have been cloned and sequenced and show 59% identity to each other. The former gene is also found to have approximately 75% similarity to the characterized gene in C. kluyveri (Giesel and Simon Arch Microbiol 135(1):51-57 (1983)). It has been reported based on these sequence results that enr is very similar to the dienoyl CoA reductase in E. coli (fadH) (163 Rohdich et al., supra (2001)). The C. thermoaceticum enr gene has also been expressed in an enzymatically active form in E. coli (163 Rohdich et al., supra (2001)).

| Gene | Accession No. | GI No. | Organism |
|---|---|---|---|
| fadH | NP_417552.1 | 16130976 | Escherichia coli |
| enr | ACA54153.1 | 169405742 | Clostridium botulinum A3 str |
| enr | CAA71086.1 | 2765041 | Clostridium tyrobutyricum |
| enr | CAA76083.1 | 3402834 | Clostridium kluyveri |
| enr | YP_430895.1 | 83590886 | Moorella thermoacetica |

1.4.1.a—Oxidoreductase Operating on Amino Acids

[0508] Most oxidoreductases operating on amino acids catalyze the oxidative deamination of alpha-amino acids with NAD+ or NADP+ as acceptor. Exemplary oxidoreductases operating on amino acids include glutamate dehydrogenase (deaminating), encoded by gdhA, leucine dehydrogenase (deaminating), encoded by ldh, and aspartate dehydrogenase (deaminating), encoded by nadX. The gdhA gene product from Escherichia coli (Korber et al. J. Mol. Biol. 234:1270-1273 (1993); McPherson and Wootton Nucleic. Acids Res. 11:5257-5266 (1983)), gdh from Thermotoga maritima (Kort et al. Extremophiles 1:52-60 (1997); Lebbink, et al. J. Mol. Biol. 280:287-296 (1998)); Lebbink et al. J. Mol. Biol. 289:357-369 (1999)), and gdhA1 from Halobacterium salinarum (Ingoldsby et al. Gene 349:237-244 (2005)) catalyze the reversible interconversion of glutamate to 2-oxoglutarate and ammonia, while favoring NADP(H), NAD(H), or both, respectively. The ldh gene of Bacillus cereus encodes the LeuDH protein that has a wide of range of substrates including leucine, isoleucine, valine, and 2-aminobutanoate (Ansorge and Kula Biotechnol Bioeng. 68:557-562 (2000); Stoyan et al. J. Biotechnol 54:77-80 (1997)). The nadX gene from Thermotoga maritime encoding for the aspartate dehydrogenase is involved in the biosynthesis of NAD (Yang et al. J. Biol. Chem. 278:8804-8808 (2003)).

| Gene | Accession No. | GI No. | Organism |
|---|---|---|---|
| gdhA | P00370 | 118547 | Escherichia coli |
| gdh | P96110.4 | 6226595 | Thermotoga maritima |
| gdhA1 | NP_279651.1 | 15789827 | Halobacterium salinarum |
| ldh | P0A393 | 61222614 | Bacillus cereus |
| nadX | NP_229443.1 | 15644391 | Thermotoga maritima |

[0509] The lysine 6-dehydrogenase (deaminating), encoded by lysDH gene, catalyze the oxidative deamination of the ε-amino group of L-lysine to form 2-aminoadipate-6-semialdehyde, which in turn nonenzymatically cyclizes to form Δ1-piperideine-6-carboxylate (Misono and Nagasaki J. Bacteriol. 150:398-401 (1982)). The lysDH gene from Geobacillus stearothermophilus encodes a thermophilic NAD-dependent lysine 6-dehydrogenase (Heydari et al. Appl Environ. Microbiol 70:937-942 (2004)). In addition, the lysDH gene from Aeropyrum pernix K1 is identified through homology from genome projects.

| Gene | Accession No. | GI No. | Organism |
|---|---|---|---|
| lysDH | AB052732 | 13429872 | Geobacillus stearothermophilus |
| lysDH | NP_147035.1 | 14602185 | Aeropyrum pernix K1 |
| ldh | P0A393 | 61222614 | Bacillus cereus |

2.3.1.a—Acyltransferase (Transferring Phosphate Group)

[0510] Exemplary phosphate transferring acyltransferases include phosphotransacetylase, encoded by pta, and phosphotransbutyrylase, encoded by ptb. The pta gene from E. coli encodes an enzyme that can convert acetyl-CoA into acetyl-phosphate, and vice versa (Suzuki, T. Biochim. Biophys. Acta 191:559-569 (1969)). This enzyme can also utilize propionyl-CoA instead of acetyl-CoA forming propionate in the process (Hesslinger et al. Mol. Microbiol 27:477-492 (1998)). Similarly, the ptb gene from C. acetobutylicum encodes an enzyme that can convert butyryl-CoA into butyryl-phosphate (Walter et al. Gene 134(1): p. 107-11(1993)); Huang et al. J Mol Microbiol Biotechnol 2(1): p. 33-38 (2000). Additional ptb genes can be found in butyrate-producing bacterium L2-50 (Louis et al. J. Bacteriol. 186:2099-2106 (2004)) and Bacillus megaterium (Vazquez et al. Curr. Microbiol 42:345-349 (2001)).

| Gene | Accession No. | GI No. | Organism |
|---|---|---|---|
| pta | NP_416800.1 | 16130232 | Escherichia coli |
| ptb | NP_349676 | 15896327 | Clostridium acetobutylicum |
| ptb | AAR19757.1 | 38425288 | butyrate-producing bacterium L2-50 |
| ptb | CAC07932.1 | 10046659 | Bacillus megaterium |

2.6.1.a—Aminotransferase

[0511] Aspartate aminotransferase transfers an amino group from aspartate to alpha-ketoglutarate, forming glutamate and oxaloacetate. This conversion is catalyzed by, for example, the gene products of aspC from Escherichia coli (Yagi et al. FEBS Lett. 100:81-84 (1979); Yagi et al. Methods Enzymol. 113:83-89 (1985)), AAT2 from Saccharomyces cerevisiae (Yagi et al. J Biochem. 92:35-43 (1982)) and ASPS from Arabidopsis thaliana (48, 108, 225 48. de la et al. Plant J46:414-425 (2006); Kwok and Hanson J Exp. Bot. 55:595-604 (2004); Wilkie and Warren Protein Expr. Purif. 12:381-389 (1998)). Valine aminotransferase catalyzes the conversion of valine and pyruvate to 2-ketoisovalerate and alanine. The E. coli gene, avtA, encodes one such enzyme (Whalen and Berg J. Bacteriol. 150:739-746 (1982)). This gene product also catalyzes the amination of α-ketobutyrate to generate α-aminobutyrate, although the amine donor in this reaction has not been identified (Whalen and Berg J. Bacteriol. 158:571-574 (1984)). The gene product of the E. coli serC catalyzes two reactions, phosphoserine aminotransferase and phosphohydroxythreonine aminotransferase (Lam and Winkler J. Bacteriol. 172:6518-6528 (1990)), and activity on non-phosphorylated substrates could not be detected (Drewke et al. FEBS. Lett. 390:179-182 (1996)).

| Gene | Accession No. | GI No. | Organism |
|---|---|---|---|
| aspC | NP_415448.1 | 16128895 | Escherichia coli |
| AAT2 | P23542.3 | 1703040 | Saccharomyces cerevisiae |
| ASP5 | P46248.2 | 20532373 | Arabidopsis thaliana |
| avtA | YP_026231.1 | 49176374 | Escherichia coli |
| serC | NP_415427.1 | 16128874 | Escherichia coli |

[0512] Cargill has developed a beta-alanine/alpha-ketoglutarate aminotransferase for producing 3-HP from beta-alanine via malonyl-semialdehyde (PCT/US2007/076252 (Jessen et al)). The gene product of SkPYD4 in Saccharomyces kluyveri was also shown to preferentially use beta-alanine as the amino group donor (Andersen et al. FEBS. J. 274:1804-1817 (2007)). SkUGA1 encodes a homologue of Saccharomyces cerevisiae GABA aminotransferase, UGA1 (Ramos et al. Eur. J. Biochem. 149:401-404 (1985)), whereas SkPYD4 encodes an enzyme involved in both β-alanine and GABA transamination (Andersen et al. FEBS. J. 274:1804-1817 (2007)). 3-Amino-2-methylpropionate transaminase catalyzes the transformation from methylmalonate semialdehyde to 3-amino-2-methylpropionate. The enzyme has been characterized in Rattus norvegicus and Sus scrofa and is encoded by Abat (Kakimoto et al. Biochim. Biophys. Acta 156:374-380 (1968); Tamaki et al. Methods Enzymol. 324:376-389 (2000)). Enzyme candidates in other organisms with high sequence homology to 3-amino-2-methylpropionate transaminase include Gta-1 in C. elegans and gabT in Bacillus subtilus. Additionally, one of the native GABA aminotransferases in E. coli, encoded by gene gabT, has been shown to have broad substrate specificity (Liu et al. Biochemistry 43:10896-10905 (2004); Schulz et al. Appl Environ Microbiol 56:1-6 (1990)). The gene product of puuE catalyzes the other 4-aminobutyrate transaminase in E. coli (Kurihara et al. J. Biol. Chem. 280:4602-4608 (2005)).

| Gene | Accession No. | GI No. | Organism |
|---|---|---|---|
| SkyPYD4 | ABF58893.1 | 98626772 | Saccharomyces kluyveri |
| SkUGA1 | ABF58894.1 | 98626792 | Saccharomyces kluyveri |
| UGA1 | NP_011533.1 | 6321456 | Saccharomyces cerevisiae |
| Abat | P50554.3 | 122065191 | Rattus norvegicus |
| Abat | P80147.2 | 120968 | Sus scrofa |
| Gta-1 | Q21217.1 | 6016091 | Caenorhabditis elegans |
| gabT | P94427.1 | 6016090 | Bacillus subtilus |
| gabT | P22256.1 | 120779 | Escherichia coli K12 |
| puuE | NP_415818.1 | 16129263 | Escherichia coli K12 |

[0513] The X-ray crystal structures of E. coli 4-aminobutyrate transaminase unbound and bound to the inhibitor were reported (Liu et al. Biochemistry 43:10896-10905 (2004)). The substrates binding and substrate specificities were studied and suggested. The roles of active site residues were studied by site-directed mutagenesis and X-ray crystallography (Liu et al. Biochemistry 44:2982-2992 (2005)). Based on the structural information, attempt was made to engineer E. coli 4-aminobutyrate transaminase with novel enzymatic activity. These studies provide a base for evolving transaminase activity for BDO pathways.

2.7.2.a—Phosphotransferase, Carboxyl Group Acceptor

[0514] Exemplary kinases include the E. coli acetate kinase, encoded by ackA (Skarstedt and Silverstein J. Biol. Chem. 251:6775-6783 (1976)), the C. acetobutylicum butyrate kinases, encoded by buk1 and buk2(Walter et al. Gene 134(1):107-111(1993) (Huang et al. J Mol Microbiol Biotechnol 2(1):33-38 (2000)1 and the E. coli gamma-glutamyl kinase, encoded by proB (Smith et al. J. Bacteriol. 157:545-551 (1984)). These enzymes phosphorylate acetate, butyrate, and glutamate, respectively. The ackA gene product from E. coli also phosphorylates propionate (Hesslinger et al. Mol. Microbiol 27:477-492 (1998)).

| Gene | Accession No. | GI No. | Organism |
|---|---|---|---|
| ackA | NP_416799.1 | 16130231 | Escherichia coli |
| buk1 | NP_349675 | 15896326 | Clostridium acetobutylicum |
| buk2 | Q97II1 | 20137415 | Clostridium acetobutylicum |
| proB | NP_414777.1 | 16128228 | Escherichia coli |

2.8.3.a—Coenzyme-A Transferase

[0515] In the CoA-transferase family, E. coli enzyme acyl-CoA:acetate-CoA transferase, also known as acetate-CoA transferase (EC 2.8.3.8), has been shown to transfer the CoA moiety to acetate from a variety of branched and linear acyl-CoA substrates, including isobutyrate (Matthies and Schink Appl Environ Microbiol 58:1435-1439 (1992)), valerate (Vanderwinkel et al. Biochem. Biophys. Res Commun. 33:902-908 (1968)) and butanoate (Vanderwinkel, supra (1968)). This enzyme is encoded by atoA (alpha subunit) and atoD (beta subunit) in E. coli sp. K12 (Korolev et al. Acta Crystallogr. D Biol Crystallogr. 58:2116-2121 (2002); Vanderwinkel, supra (1968)) and actA and cg0592 in Corynebacterium glutamicum ATCC 13032 (Duncan et al. Appl Environ Microbiol 68:5186-5190 (2002)). Additional genes found by sequence homology include atoD and atoA in Escherichia coli UT189

| Gene | Accession No. | GI No. | Organism |
|---|---|---|---|
| atoA | P76459.1 | 2492994 | Escherichia coli K12 |
| atoD | P76458.1 | 2492990 | Escherichia coli K12 |
| actA | YP_226809.1 | 62391407 | Corynebacterium glutamicum |
| | | | ATCC 13032 |
| cg0592 | YP_224801.1 | 62389399 | Corynebacterium glutamicum |
| | | | ATCC 13032 |
| atoA | ABE07971.1 | 91073090 | Escherichia coli UT189 |
| atoD | ABE07970.1 | 91073089 | Escherichia coli UT189 |

[0516] Similar transformations are catalyzed by the gene products of cat1, cat2, and cat3 of Clostridium kluyveri which have been shown to exhibit succinyl-CoA, 4-hydroxybutyryl-CoA, and butyryl-CoA acetyltransferase activity, respectively (Seedorf et al. Proc Natl Acad Sci U.S.A. 105(6):2128-2133 (2008); Sohling and Gottschalk J Bacteriol 178(3):871-880 (1996)].

| Gene | Accession No. | GI No. | Organism |
|---|---|---|---|
| cat1 | P38946.1 | 729048 | Clostridium kluyveri |
| cat2 | P38942.2 | 1705614 | Clostridium kluyveri |
| cat3 | EDK35586.1 | 146349050 | Clostridium kluyveri |

[0517] The glutaconate-CoA-transferase (EC 2.8.3.12) enzyme from anaerobic bacterium Acidaminococcus fermentans reacts with diacid glutaconyl-CoA and 3-butenoyl-CoA (Mack and Buckel FEBS Lett. 405:209-212 (1997)). The genes encoding this enzyme are gctA and gctB. This enzyme has reduced but detectable activity with other CoA derivatives including glutaryl-CoA, 2-hydroxyglutaryl-CoA, adipyl-CoA and acrylyl-CoA (Buckel et al. Eur. J. Biochem. 118:315-321 (1981)). The enzyme has been cloned and expressed in E. coli (Mac et al. Eur. J. Biochem. 226:41-51 (1994)).

| Gene | Accession No. | GI No. | Organism |
|---|---|---|---|
| gctA | CAA57199.1 | 559392 | Acidaminococcus fermentans |
| gctB | CAA57200.1 | 559393 | Acidaminococcus fermentans |

3.1.2.a—Thiolester Hydrolase (CoA Specific)

[0518] In the CoA hydrolase family, the enzyme 3-hydroxyisobutyryl-CoA hydrolase is specific for 3-HIBCoA and has been described to efficiently catalyze the desired transformation during valine degradation (Shimomura et al. J Biol Chem 269:14248-14253 (1994)). Genes encoding this enzyme include hibch of Rattus norvegicus (Shimomura et al., supra (1994); Shimomura et al. Methods Enzymol. 324:229-240 (2000) and Homo sapiens (Shimomura et al., supra, 2000). Candidate genes by sequence homology include hibch of Saccharomyces cerevisiae and BC_{—}2292 of Bacillus cereus.

| Gene | Accession No. | GI No. | Organism |
|---|---|---|---|
| hibch | Q5XIE6.2 | 146324906 | Rattus norvegicus |
| hibch | Q6NVY1.2 | 146324905 | Homo sapiens |
| hibch | P28817.2 | 2506374 | Saccharomyces cerevisiae |
| BC_2292 | Q81DR3 | 81434808 | Bacillus cereus |

[0519] The conversion of adipyl-CoA to adipate can be carried out by an acyl-CoA hydrolase or equivalently a thioesterase. The top E. coli gene candidate is tesB (Naggert et al. J Biol Chem. 266(17):11044-11050 (1991)] which shows high similarity to the human acot8 which is a dicarboxylic acid acetyltransferase with activity on adipyl-CoA (Westin et al. J Biol Chem 280(46): 38125-38132 (2005). This activity has also been characterized in the rat liver (Deana, Biochem Int. 26(4): p. 767-773 (1992)).

| Gene | Accession No. | GI No. | Organism |
|---|---|---|---|
| tesB | NP_414986 | 16128437 | Escherichia coli |
| acot8 | CAA15502 | 3191970 | Homo sapiens |
| acot8 | NP_570112 | 51036669 | Rattus norvegicus |

[0520] Other potential E. coli thiolester hydrolases include the gene products of tesA (Bonner and Bloch, J Biol Chem. 247(10):3123-3133 (1972)), ybgC (Kuznetsova et al., FEMS Microbiol Rev. 29(2):263-279 (2005); Zhuang et al., FEBS Lett. 516(1-3):161-163 (2002)) paaI (Song et al., J Biol Chem. 281(16):11028-11038 (2006)), and ybdB (Leduc et al., J Bacteriol. 189(19):7112-7126 (2007)).

| Gene | Accession No. | GI No. | Organism |
|---|---|---|---|
| tesA | NP_415027 | 16128478 | Escherichia coli |
| ybgC | NP_415264 | 16128711 | Escherichia coli |
| paaI | NP_415914 | 16129357 | Escherichia coli |
| ybdB | NP_415129 | 16128580 | Escherichia coli |

[0521] Several eukaryotic acetyl-CoA hydrolases (EC 3.1.2.1) have broad substrate specificity. The enzyme from Rattus norvegicus brain (Robinson et al. Biochem. Biophys. Res. Commun. 71:959-965 (1976)) can react with butyryl-CoA, hexanoyl-CoA and malonyl-CoA.

| Gene | Accession No. | GI No. | Organism |
|---|---|---|---|
| acot12 | NP_570103.1 | 18543355 | Rattus norvegicus |

4.1.1.a—Carboxy-Lyase

[0522] An exemplary carboxy-lyase is acetolactate decarboxylase which participates in citrate catabolism and branched-chain amino acid biosynthesis, converting 2-acetolactate to acetoin. In Lactococcus lactis the enzyme is composed of six subunits, encoded by gene aldB, and is activated by valine, leucine and isoleucine (Goupil et al. Appl. Environ. Microbiol. 62:2636-2640 (1996); Goupil-Feuillerat et al. J. Bacteriol. 182:5399-5408 (2000)). This enzyme has been overexpressed and characterized in E. coli (Phalip et al. FEBS Lett. 351:95-99 (1994)). In other organisms the enzyme is a dimer, encoded by aldC in Streptococcus thermophilus (Monnet et al. Lett. Appl. Microbiol. 36:399-405 (2003)), aldB in Bacillus brevis (Diderichsen et al. J. Bacteriol. 172:4315-4321(1990); Najmudin et al. Acta Crystallogr. D. Biol. Crystallogr. 59:1073-1075 (2003)) and budA from Enterobacter aerogenes (Diderichsen et al. J. Bacteriol. 172:4315-4321(1990)). The enzyme from Bacillus brevis was cloned and overexpressed in Bacillus subtilis and characterized crystallographically (Najmudin et al. Acta Crystallogr. D. Biol. Crystallogr 59:1073-1075 (2003)). Additionally, the enzyme from Leuconostoc lactis has been purified and characterized but the gene has not been isolated (O'Sullivan et al. FEMS Microbiol. Lett. 194:245-249 (2001)).

| Gene | Accession No. | GI No. | Organism |
|---|---|---|---|
| aldB | NP_267384.1 | 15673210 | Lactococcus lactis |
| aldC | Q8L208 | 75401480 | Streptococcus thermophilus |
| aldB | P23616.1 | 113592 | Bacillus brevis |
| budA | P05361.1 | 113593 | Enterobacter aerogenes |

[0523] Aconitate decarboxylase catalyzes the final step in itaconate biosynthesis in a strain of Candida and also in the filamentous fungus Aspergillus terreus (Bonnarme et al. J Bacteriol. 177:3573-3578 (1995); Willke and Vorlop Appl Microbiol Biotechnol 56:289-295 (2001)). Although itaconate is a compound of biotechnological interest, the aconitate decarboxylase gene or protein sequence has not been reported to date.

[0524] 4-oxalocronate decarboxylase has been isolated from numerous organisms and characterized. Genes encoding this enzyme include dmpH and dmpE in Pseudomonas sp. (strain 600) (Shingler et al. J Bacteriol. 174:711-724 (1992)), xylII and xylIII from Pseudomonas putida (Kato and Asano Arch. Microbiol 168:457-463 (1997); Lian and Whitman J. Am. Chem. Soc. 116:10403-10411(1994); Stanley et al. Biochemistry 39:3514 (2000)) and Reut_B5691 and Reut_B5692 from Ralstonia eutropha JMP134 (Hughes et al. J Bacteriol. 158:79-83 (1984)). The genes encoding the enzyme from Pseudomonas sp. (strain 600) have been cloned and expressed in E. coli (Shingler et al. J Bacteriol. 174:711-724 (1992)).

| Gene | Accession No. | GI No. | Organism |
|---|---|---|---|
| dmpH | CAA43228.1 | 45685 | Pseudomonas sp. CF600 |
| dmpE | CAA43225.1 | 45682 | Pseudomonas sp. CF600 |
| xylII | YP_709328.1 | 111116444 | Pseudomonas putida |
| xylIII | YP_709353.1 | 111116469 | Pseudomonas putida |
| Reut_B5691 | YP_299880.1 | 73539513 | Ralstonia eutropha JMP134 |
| Reut_B5692 | YP_299881.1 | 73539514 | Ralstonia eutropha JMP134 |

[0525] An additional class of decarboxylases has been characterized that catalyze the conversion of cinnamate (phenylacrylate) and substituted cinnamate derivatives to the corresponding styrene derivatives. These enzymes are common in a variety of organisms and specific genes encoding these enzymes that have been cloned and expressed in E. coli are: pad/from Saccharomyces cerevisae (Clausen et al. Gene 142:107-112 (1994)), pdc from Lactobacillus plantarum (Barthelmebs et al. Appl Environ Microbiol 67:1063-1069 (2001); Qi et al. Metab Eng 9:268-276 (2007); Rodriguez et al. J. Agric. Food Chem. 56:3068-3072 (2008)), pofK (pad) from Klebsiella oxytoca (Hashidoko et al. Biosci. Biotech. Biochem. 58:217-218 (1994); Uchiyama et al. Biosci. Biotechnol. Biochem. 72:116-123 (2008)), Peclicoccus pentosaceus (Barthelmebs et al. Appl Environ Microbiol 67:1063-1069 (2001)), and padC from Bacillus subtilis and Bacillus pumilus (Lingen et al. Protein Eng 15:585-593 (2002)). A ferulic acid decarboxylase from Pseudomonas fluorescens also has been purified and characterized (Huang et al. J. Bacteriol. 176:5912-5918 (1994)). Importantly, this class of enzymes have been shown to be stable and do not require either exogenous or internally bound co-factors, thus making these enzymes ideally suitable for biotransformation (Sariaslani, Annu. Rev. Microbiol. 61:51-69 (2007)).

| Gene | Accession No. | GI No. | Organism |
|---|---|---|---|
| pad1 | AB368798 | 188496948 | Saccharomyces cerevisae |
| | BAG32372.1 | 188496949 | |
| pdc | U63827 | 1762615, | Lactobacillus plantarum |
| | AAC45282.1 | 1762616 | |
| pofK (pad) | AB330293, | 149941607, | Klebsiella oxytoca |
| | BAF65031.1 | 149941608 | |
| padC | AF017117 | 2394281, | Bacillus subtilis |
| | AAC46254.1 | 2394282 | |
| pad | AJ276891 | 11322456, | Pedicoccus pentosaceus |
| | CAC16794.1 | 11322458 | |
| pad | AJ278683 | 11691809, | Bacillus pumilus |
| | CAC18719.1 | 11691810 | |

[0526] Additional decarboxylase enzymes can form succinic semialdehyde from alpha-ketoglutarate. These include the alpha-ketoglutarate decarboxylase enzymes from Euglena gracilis (Shigeoka et al. Biochem. J. 282(Pt 2):319-323 (1992); Shigeoka and Nakano Arch. Biochem. Biophys. 288:22-28 (1991); Shigeoka and Nakano Biochem. J. 292 (Pt 2):463-467 (1993)), whose corresponding gene sequence has yet to be determined, and from Mycobacterium tuberculosis (Tian et al. Proc Natl Acad Sci U.S.A. 102:10670-10675 (2005)). In addition, glutamate decarboxylase enzymes can convert glutamate into 4-aminobutyrate such as the products of the E. coli gadA and gadB genes (De Biase et al. Protein. Expr. Purif. 8:430-438 (1993)).

| Gene | Accession No. | GI No. | Organism |
|---|---|---|---|
| kgd | O50463.4 | 160395583 | Mycobacterium tuberculosis |
| gadA | NP_417974 | 16131389 | Escherichia coli |
| gadB | NP_416010 | 16129452 | Escherichia coli |

### Keto-Acid Decarboxylases

[0527] Pyruvate decarboxylase (PDC, EC 4.1.1.1), also termed keto-acid decarboxylase, is a key enzyme in alcoholic fermentation, catalyzing the decarboxylation of pyruvate to acetaldehyde. This enzyme has a broad substrate range for aliphatic 2-keto acids including 2-ketobutyrate, 2-ketovalerate, 3-hydroxypyruvate and 2-phenylpyruvate (Berg et al. Science 318:1782-1786 (2007)). The PDC from Zymomonas mobilus, encoded by pdc, has been a subject of directed engineering studies that altered the affinity for different substrates (Siegert et al. Protein Eng Des Sel 18:345-357 (2005)). The PDC from Saccharomyces cerevisiae has also been extensively studied, engineered for altered activity, and functionally expressed in E. coli (Killenberg-Jabs et al. Eur. J. Biochem. 268:1698-1704 (2001); Li and Jordan Biochemistry 38:10004-10012 (1999); ter Schure et al. Appl. Environ. Microbiol. 64:1303-1307 (1998)). The crystal structure of this enzyme is available (Killenberg-Jabs Eur. J. Biochem. 268:1698-1704 (2001)). Other well-characterized PDC candidates include the enzymes from Acetobacter pasteurians (Chandra et al. Arch. Microbiol. 176:443-451(2001)) and Kluyveromyces lactis (Krieger et al. Eur. J. Biochem. 269:3256-3263 (2002)).

| Gene | Accession No. | GI No. | Organism |
|---|---|---|---|
| pdc | P06672.1 | 118391 | Zymomonas mobilus |
| pdc1 | P06169 | 30923172 | Saccharomyces cerevisiae |
| pdc | Q8L388 | 75401616 | Acetobacter pasteurians |
| pdc1 | Q12629 | 52788279 | Kluyveromyces lactis |

[0528] Like PDC, benzoylformate decarboxylase (EC 4.1.1.7) has a broad substrate range and has been the target of enzyme engineering studies. The enzyme from Pseudomonas putida has been extensively studied and crystal structures of this enzyme are available (Hasson et al. Biochemistry 37:9918-9930 (1998); Polovnikova et al. Biochemistry 42:1820-1830 (2003)). Site-directed mutagenesis of two residues in the active site of the Pseudomonas putida enzyme altered the affinity (Km) of naturally and non-naturally occurring substrates (Siegert Protein Eng Des Sel 18:345-357 (2005)). The properties of this enzyme have been further modified by directed engineering (Lingen et al. Protein Eng 15:585-593 (2002)); Lingen Chembiochem 4:721-726 (2003)). The enzyme from Pseudomonas aeruginosa, encoded by mdlC, has also been characterized experimentally (Barrowman et al. FEMS Microbiology Letters 34:57-60 (1986)). Additional gene candidates from Pseudomonas stutzeri, Pseudomonas fluorescens and other organisms can be inferred by sequence homology or identified using a growth selection system developed in Pseudomonas putida (Henning et al. Appl. Environ. Microbiol. 72:7510-7517 (2006)).

| Gene | Accession No. | GI No. | Organism |
|---|---|---|---|
| mdlC | P20906.2 | 3915757 | Pseudomonas putida |
| mdlC | Q9HUR2.1 | 81539678 | Pseudomonas aeruginosa |
| dpgB | ABN80423.1 | 126202187 | Pseudomonas stutzeri |
| ilvB-1 | YP_260581.1 | 70730840 | Pseudomonas fluorescens |

4.2.1.a—Hydro-Lyase

[0529] The 2-(hydroxymethyl)glutarate dehydratase of Eubacterium barkeri is an exemplary hydro-lyase. This enzyme has been studied in the context of nicotinate catabolism and is encoded by hmd (Alhapel et al. Proc Natl Acad Sci USA 103:12341-12346 (2006)). Similar enzymes with high sequence homology are found in Bacteroides capillosus, Anaerotruncus colihominis, and Natranaerobius thermophilius.

| Gene | Accession No. | GI No. | Organism |
|---|---|---|---|
| hmd | ABC88407.1 | 86278275 | Eubacterium |
| | | | barkeri |
| BACCAP_02294 | ZP_02036683.1 | 154498305 | Bacteroides |
| | | | capillosus |
| | | | ATCC 29799 |
| ANACOL_02527 | ZP_02443222.1 | 167771169 | Anaerotruncus |
| | | | colihominis |
| | | | DSM 17241 |
| NtherDRAFT_2368 | ZP_02852366.1 | 169192667 | Natranaerobius |
| | | | thermophilus |
| | | | JW/NM-WN-LF |

[0530] A second exemplary hydro-lyase is fumarate hydratase, an enzyme catalyzing the dehydration of malate to fumarate. A wealth of structural information is available for this enzyme and researchers have successfully engineered the enzyme to alter activity, inhibition and localization (Weaver, T. Acta Crystallogr. D Biol Crystallogr 61:1395-1401 (2005)). Additional fumarate hydratases include those encoded by fumC from Escherichia coli (Estevez et al. Protein Sci. 11:1552-1557 (2002); Hong and Lee Biotechnol. Bioprocess Eng. 9:252-255 (2004); Rose and Weaver Proc Natl Acad Sci U.S.A 101:3393-3397 (2004)), Campylobacter jejuni (Smith et al. Int. J Biochem. Cell Biol 31:961-975 (1999)) and Thermus thermophilus (Mizobata et al. Arch. Biochem. Biophys. 355:49-55 (1998)), and fumH from Rattus norvegicus (Kobayashi et al. J Biochem. 89:1923-1931(1981)). Similar enzymes with high sequence homology include fum1 from Arabidopsis thaliana and fumC from Corynebacterium glutamicum.

| Gene | Accession No. | GI No. | Organism |
|---|---|---|---|
| fumC | P05042.1 | 120601 | Escherichia coli K12 |
| fumC | O69294.1 | 9789756 | Campylobacter jejuni |
| fumC | P84127 | 75427690 | Thermus thermophilus |
| fumH | P14408.1 | 120605 | Rattus norvegicus |
| fum1 | P93033.2 | 39931311 | Arabidopsis thaliana |
| fumC | Q8NRN8.1 | 39931596 | Corynebacterium glutamicum |

[0531] Citramalate hydrolyase, also called 2-methylmalate dehydratase, converts 2-methylmalate to mesaconate. 2-Methylmalate dehydratase activity was detected in Clostridium tetanomorphum, Morganella morganii, Citrobacter amalonaticus in the context of the glutamate degradation VI pathway (Kato and Asano Arch. Microbiol 168:457-463 (1997)); however the genes encoding this enzyme have not been sequenced to date.

[0532] The gene product of crt from C. acetobutylicum catalyzes the dehydration of 3-hydroxybutyryl-CoA to crotonyl-CoA (Atsumi et al. Metab Eng.; 29 (2007)); Boynton et al. Journal of Bacteriology 178:3015-3024 (1996)). The enoyl-CoA hydratases, phaA and phaB, of P. putida are believed to carry out the hydroxylation of double bonds during phenylacetate catabolism; (Olivera et al. Proc Natl Acad Sci USA 95(11):6419-6424 (1998)). The paaA and paaB from P. fluorescens catalyze analogous transformations (14 Olivera et al., supra, 1998). Lastly, a number of Escherichia coli genes have been shown to demonstrate enoyl-CoA hydratase functionality including maoC (Park and Lee J Bacteriol 185(18):5391-5397 (2003)), paaF (Park and Lee Biotechnol Bioeng. 86(6):681-686 (2004a)); Park and Lee Appl Biochem Biotechnol. 113-116: 335-346 (2004b)); Ismail et al. Eur J Biochem 270(14):p. 3047-3054 (2003), and paaG (Park and Lee, supra, 2004; Park and Lee supra, 2004b; Ismail et al., supra, 2003).

| Gene | Accession No. | GI No. | Organism |
|---|---|---|---|
| maoC | NP_415905.1 | 16129348 | Escherichia coli |
| paaF | NP_415911.1 | 16129354 | Escherichia coli |
| paaG | NP_415912.1 | 16129355 | Escherichia coli |
| crt | NP_349318.1 | 15895969 | Clostridium acetobutylicum |
| paaA | NP_745427.1 | 26990002 | Pseudomonas putida |
| paaB | NP_745426.1 | 26990001 | Pseudomonas putida |
| phaA | ABF82233.1 | 106636093 | Pseudomonas fluorescens |
| phaB | ABF82234.1 | 106636094 | Pseudomonas fluorescens |

[0533] The E. coli genes fadA and fadB encode a multienzyme complex that exhibits ketoacyl-CoA thiolase, 3-hydroxyacyl-CoA dehydrogenase, and enoyl-CoA hydratase activities (Yang et al. Biochemistry 30(27): p. 6788-6795 (1991); Yang et al. J Biol Chem 265(18): p. 10424-10429 (1990); Yang et al. J Biol Chem 266(24): p. 16255 (1991); Nakahigashi and Inokuchi Nucleic Acids Res 18(16): p. 4937 (1990)). The fadI and fadJ genes encode similar functions and are naturally expressed only anaerobically (Campbell et al. Mol Microbiol 47(3): p. 793-805 (2003). A method for producing poly[(R)-3-hydroxybutyrate] in E. coli that involves activating fadB (by knocking out a negative regulator, fadR) and co-expressing a non-native ketothiolase (phaA from Ralstonia eutropha) has been described previously (Sato et al. J Biosci Bioeng 103(1): 38-44 (2007)). This work clearly demonstrates that a β-oxidation enzyme, in particular the gene product of fadB which encodes both 3-hydroxyacyl-CoA dehydrogenase and enoyl-CoA hydratase activities, can function as part of a pathway to produce longer chain molecules from acetyl-CoA precursors.

| Gene | Accession No. | GI No. | Organism |
|---|---|---|---|
| fadA | YP_026272.1 | 49176430 | Escherichia coli |
| fadB | NP_418288.1 | 16131692 | Escherichia coli |
| fadI | NP_416844.1 | 16130275 | Escherichia coli |
| fadJ | NP_416843.1 | 16130274 | Escherichia coli |
| fadR | NP_415705.1 | 16129150 | Escherichia coli |

4.3.1.a—Ammonia-Lyase

[0534] Aspartase (EC 4.3.1.1), catalyzing the deamination of aspartate to fumarate, is a widespread enzyme in microorganisms, and has been characterized extensively (Viola, R. E. Adv. Enzymol. Relat Areas Mol. Biol 74:295-341(2000)). The crystal structure of the E. coli aspartase, encoded by aspA, has been solved (Shi et al. Biochemistry 36:9136-9144 (1997)). The E. coli enzyme has also been shown to react with alternate substrates aspartatephenylmethylester, asparagine, benzyl-aspartate and malate (Ma et al. Ann N.Y. Acad Sci 672:60-65 (1992)). In a separate study, directed evolution was been employed on this enzyme to alter substrate specificity (Asano et al. Biomol. Eng 22:95-101 (2005)). Enzymes with aspartase functionality have also been characterized in Haemophilus influenzae (Sjostrom et al. Biochim. Biophys. Acta 1324:182-190 (1997)), Pseudomonas fluorescens (Takagi et al. J. Biochem. 96:545-552 (1984)), Bacillus subtilus (Sjostrom et al. Biochim. Biophys. Acta 1324:182-190 (1997)) and Serratia marcescens (Takagi and Kisumi J Bacteriol. 161:1-6 (1985)).

| Gene | Accession No. | GI No. | Organism |
|---|---|---|---|
| aspA | NP_418562 | 90111690 | Escherichia coli K12 subsp. MG1655 |
| aspA | P44324.1 | 1168534 | Haemophilus influenzae |
| aspA | P07346.1 | 114273 | Pseudomonas fluorescens |
| ansB | P26899.1 | 114271 | Bacillus subtilus |
| aspA | P33109.1 | 416661 | Serratia marcescens |

[0535] 3-methylaspartase (EC 4.3.1.2), also known as beta-methylaspartase or 3-methylaspartate ammonia-lyase, catalyzes the deamination of threo-3-methylasparatate to mesaconate. The 3-methylaspartase from Clostridium tetanomorphum has been cloned, functionally expressed in E. coli, and crystallized (Asuncion et al. Acta Crystallogr. D Biol Crystallogr. 57:731-733 (2001); Asuncion et al. J Biol Chem. 277:8306-8311(2002); Botting et al. Biochemistry 27:2953-2955 (1988); Goda et al. Biochemistry 31:10747-10756 (1992). In Citrobacter amalonaticus, this enzyme is encoded by BAA28709 (Kato and Asano Arch. Microbiol 168:457-463 (1997)). 3-Methylaspartase has also been crystallized from E. coli YG1002 (Asano and Kato FEMS Microbiol Lett. 118:255-258 (1994)) although the protein sequence is not listed in public databases such as GenBank Sequence homology can be used to identify additional candidate genes, including CTC 02563 in C. tetani and E00761 in Escherichia coli O157:H7.

| Gene | Accession No. | GI No. | Organism |
|---|---|---|---|
| MAL | AAB24070.1 | 259429 | Clostridium tetanomorphum |
| BAA28709 | BAA28709.1 | 3184397 | Citrobacter amalonaticus |
| CTC_02563 | NP_783085.1 | 28212141 | Clostridium tetani |
| ECs0761 | BAB34184.1 | 13360220 | Escherichia coli O157:H7 |
| | | | str. Sakai |

[0536] Ammonia-lyase enzyme candidates that form enoyl-CoA products include beta-alanyl-CoA ammonia-lyase (EC 4.3.1.6), which deaminates beta-alanyl-CoA, and 3-aminobutyryl-CoA ammonia-lyase (EC 4.3.1.14). Two beta-alanyl-CoA ammonia lyases have been identified and characterized in Clostridium propionicum (Herrmann et al. FEBS J. 272:813-821 (2005)). No other beta-alanyl-CoA ammonia lyases have been studied to date, but gene candidates can be identified by sequence similarity One such candidate is MXAN_{—}4385 in Myxococcus xanthus.

| Gene | Accession No. | GI No. | Organism |
|---|---|---|---|
| ac12 | CAG29275.1 | 47496504 | Clostridium propionicum |
| acl1 | CAG29274.1 | 47496502 | Clostridium propionicum |
| MXAN_4385 | YP_632558.1 | 108756898 | Myxococcus xanthus |

5.3.3.a—Isomerase

[0537] The 4-hydroxybutyryl-CoA dehydratases from both Clostridium aminobutyrium and C. kluyveri catalyze the reversible conversion of 4-hydroxybutyryl-CoA to crotonyl-CoA and posses an intrinsic vinylacetyl-CoAΔ-isomerase activity (Scherf and Buckel Eur. J Biochem. 215:421-429 (1993); Scherf et al. Arch. Microbiol 161:239-245 (1994)). Both native enzymes were purified and characterized, including the N-terminal amino acid sequences (Scherf and Buckel, supra, 1993; Scherf et al., supra, 1994). The abfD genes from C. aminobutyrium and C. kluyveri match exactly with these N-terminal amino acid sequences, thus are encoding the 4-hydroxybutyryl-CoA dehydratases/vinylacetyl-CoA Δ-isomerase. In addition, the abfD gene from Porphyromonas gingivalis ATCC 33277 is identified through homology from genome projects.

| Gene | Accession No. | GI No. | Organism |
|---|---|---|---|
| abfD | YP_001396399.1 | 153955634 | Clostridium kluyveri DSM 555 |
| abfD | P55792 | 84028213 | Clostridium aminobutyricum |
| abfD | YP_001928843 | 188994591 | Porphyromonas gingivalis |
| | | | ATCC 33277 |

5.4.3.a—Aminomutase

[0538] Lysine 2,3-aminomutase (EC 5.4.3.2) is an exemplary aminomutase that converts lysine to (3S)-3,6-diaminohexanoate, shifting an amine group from the 2- to the 3-position. The enzyme is found in bacteria that ferment lysine to acetate and butyrate, including as Fusobacterium nuleatum (kamA) (Barker et al. J. Bacteriol. 152:201-207 (1982)) and Clostridium subterminale (kamA) (Chirpich et al. J. Biol. Chem. 245:1778-1789 (1970)). The enzyme from Clostridium subterminale has been crystallized (Lepore et al. Proc. Natl. Acad. Sci. U.S.A 102:13819-13824 (2005)). An enzyme encoding this function is also encoded by yodO in Bacillus subtilus (Chen et al. Biochem. J. 348 Pt 3:539-549 (2000)). The enzyme utilizes pyridoxal 5′-phosphate as a cofactor, requires activation by S-Adenosylmethoionine, and is stereoselective, reacting with the only with L-lysine. The enzyme has not been shown to react with alternate substrates.

| Gene | Accession No. | GI No. | Organism |
|---|---|---|---|
| yodO | O34676.1 | 4033499 | Bacillus subtilus |
| kamA | Q9XBQ8.1 | 75423266 | Clostridium subterminale |
| kamA | Q8RHX4 | 81485301 | Fusobacterium nuleatum subsp. |
| | | | nuleatum |

[0539] A second aminomutase, beta-lysine 5,6-aminomutase (EC 5.4.3.3), catalyzes the next step of lysine fermentation to acetate and butyrate, which transforms (3S)-3,6-diaminohexanoate to (3S,5S)-3,5-diaminohexanoate, shifting a terminal amine group from the 6- to the 5-position. This enzyme also catalyzes the conversion of lysine to 2,5-diaminohexanoate and is also called lysine-5,6-aminomutase (EC 5.4.3.4). The enzyme has been crystallized in Clostridium sticklandii (kamD, kamE) (Berkovitch et al. Proc. Natl. Acad. Sci. U.S.A 101:15870-15875 (2004)). The enzyme from Porphyromonas gingivalis has also been characterized (Tang et al. Biochemistry 41:8767-8776 (2002)).

| Gene | Accession No. | GI No. | Organism |
|---|---|---|---|
| kamD | AAC79717.1 | 3928904 | Clostridium sticklandii |
| kamE | AAC79718.1 | 3928905 | Clostridium sticklandii |
| kamD | NC_002950.2 | 34539880, 34540809 | Porphyromonas |
| | | | gingivalis W83 |
| kamE | NC_002950.2 | 34539880, 34540810 | Porphyromonas |
| | | | gingivalis W83 |

[0540] Omithine 4,5-aminomutase (EC 5.4.3.5) converts D-omithine to 2,4-diaminopentanoate, also shifting a terminal amine to the adjacent carbon. The enzyme from Clostridium sticklandii is encoded by two genes, oraE and oras, and has been cloned, sequenced and expressed in E. coli (Chen et al. J. Biol. Chem. 276:44744-44750 (2001)). This enzyme has not been characterized in other organisms to date.

| Gene | Accession No. | GI No. | Organism |
|---|---|---|---|
| oraE | AAK72502 | 17223685 | Clostridium sticklandii |
| oraS | AAK72501 | 17223684 | Clostridium sticklandii |

[0541] Tyrosine 2,3-aminomutase (EC 5.4.3.6) participates in tyrosine biosynthesis, reversibly converting tyrosine to 3-amino-3-(4-hdyroxyphenyl)propanoate by shifting an amine from the 2- to the 3-position. In Streptomyces globisporus the enzyme has also been shown to react with tyrosine derivatives (Christenson et al. Biochemistry 42:12708-12718 (2003)). Sequence information is not available.

[0542] Leucine 2,3-aminomutase (EC 5.4.3.7) converts L-leucine to beta-leucine during leucine degradation and biosynthesis. An assay for leucine 2,3-aminomutase detected activity in many organisms (Poston, J. M. Methods Enzymol. 166:130-135 (1988)) but genes encoding the enzyme have not been identified to date.

[0543] Cargill has developed a novel 2,3-aminomutase enzyme to convert L-alanine to β-alanine, thus creating a pathway from pyruvate to 3-HP in four biochemical steps (Liao et al., U.S. Publication No. 2005-0221466).

6.2.1.a—Acid-Thiol Ligase

[0544] An exemplary acid-thiol ligase is the gene products of sucCD of E. coli which together catalyze the formation of succinyl-CoA from succinate with the concaminant consumption of one ATP, a reaction which is reversible in vivo (Buck et al. Biochemistry 24(22): p. 6245-6252 (1985)). Additional exemplary CoA-ligases include the rat dicarboxylate-CoA ligase for which the sequence is yet uncharacterized (Vamecq et al. Biochem J. 230(3): p. 683-693 (1985)), either of the two characterized phenylacetate-CoA ligases from P. chrysogenum (Lamas-Maceiras et al. Biochem J 395(1):147-155 (2006); Wang et al. Biochem Biophys Res Commun, 360(2):453-458 (2007)), the phenylacetate-CoA ligase from Pseudomonas putida (Martinez-Blanco et al. J Biol Chem. 265(12):7084-7090 (1990)), and the 6-carboxyhexanoate-CoA ligase from Bacillus subtilis (Bower et al. J Bactetiol 178(14):4122-4130 (1996)).

| Gene | Accession No. | GI No. | Organism |
|---|---|---|---|
| sucC | NP_415256.1 | 16128703 | Escherichia coli |
| sucD | AAC73823.1 | 1786949 | Escherichia coli |
| phl | CAJ15517.1 | 77019264 | Penicillium chrysogenum |
| phlB | ABS19624.1 | 152002983 | Penicillium chrysogenum |
| paaF | AAC24333.2 | 22711873 | Pseudomonas putida |
| bioW | NP_390902.2 | 50812281 | Bacillus subtilis |

### Example V

### Exemplary BDO Pathway from Succinyl-CoA

[0545] This example describes exemplary BDO pathways from succinyl-CoA.

[0546] BDO pathways from succinyl-CoA are described herein and have been described previously (see U.S. application Ser. No. 12/049,256, filed Mar. 14, 2008, and PCT application serial No. US08/57168, filed Mar. 14, 2008, each of which is incorporated herein by reference). Additional pathways are shown in FIG. 8A. Enzymes of such exemplary BDO pathways are listed in Table 15, along with exemplary genes encoding these enzymes.

[0547] Briefly, succinyl-CoA can be converted to succinic semialdehyde by succinyl-CoA reductase (or succinate semialdehyde dehydrogenase) (EC 1.2.1.b). Succinate semialdehyde can be converted to 4-hydroxybutyrate by 4-hydroxybutyrate dehydrogenase (EC 1.1.1.a), as previously described. Alternatively, succinyl-CoA can be converted to 4-hydroxybutyrate by succinyl-CoA reductase (alcohol forming) (EC 1.1.1.c). 4-Hydroxybutyrate can be converted to 4-hydroxybutyryl-CoA by 4-hydroxybutyryl-CoA transferase (EC 2.8.3.a), as previously described, or by 4-hydroxybutyryl-CoA hydrolase (EC 3.1.2.a) or 4-hydroxybutyryl-CoA ligase (or 4-hydroxybutyryl-CoA synthetase) (EC 6.2.1.a). Alternatively, 4-hydroxybutyrate can be converted to 4-hydroxybutyryl-phosphate by 4-hydroxybutyrate kinase (EC 2.7.2.a), as previously described. 4-Hydroxybutyryl-phosphate can be converted to 4-hydroxybutyryl-CoA by phosphotrans-4-hydroxybutyrylase (EC 2.3.1.a), as previously described. Alternatively, 4-hydroxybutyryl-phosphate can be converted to 4-hydroxybutanal by 4-hydroxybutanal dehydrogenase (phosphorylating) (EC 1.2.1.d). 4-Hydroxybutyryl-CoA can be converted to 4-hydroxybutanal by 4-hydroxybutyryl-CoA reductase (or 4-hydroxybutanal dehydrogenase) (EC 1.2.1.b). Alternatively, 4-hydroxybutyryl-CoA can be converted to 1,4-butanediol by 4-hydroxybutyryl-CoA reductase (alcohol forming) (EC 1.1.1.c). 4-Hydroxybutanal can be converted to 1,4-butanediol by 1,4-butanediol dehydrogenase (EC 1.1.1.a), as previously described.

TABLE 15
BDO pathway from succinyl-CoA.

| | EC | Desired | Desired | | | GenBank ID | | |
|---|---|---|---|---|---|---|---|---|
| FIG. | class | substrate | product | Enzyme name | Gene name | (if available) | Organism | Known Substrates |
| 8A | 1.2.1.b | succinyl-CoA | succinic | succinyl-CoA | sucD | P38947.1 | Clostridium kluyveri | succinyl-CoA |
| | | | semialdehyde | reductase | | | | |
| | | | | (or succinate | | | | |
| | | | | semialdehyde | | | | |
| | | | | dehydrogenase) | | | | |
| | | | | | sucD | NP_904963.1 | Porphyromonas | succinyl-CoA |
| | | | | | | | gingivalis | |
| | | | | | Msed_0709 | YP_001190808.1 | Metallosphaera sedula | malonyl-CoA |
| 8A | 1.1.1.a | succinate | 4-hydroxy- | 4- | 4hbd | YP_726053.1 | Ralstonia eutropha | 4-hydroxybutyrate |
| | | semialdehyde | butyrate | hydroxybutyrate | | | H16 | |
| | | | | dehydrogenase | | | | |
| | | | | | 4hbd | L21902.1 | Clostridium kluyveri | 4-hydroxybutyrate |
| | | | | | | | DSM 555 | |
| | | | | | 4hbd | Q94B07 | Arabidopsis thaliana | 4-hydroxybutyrate |
| 8A | 1.1.1.c | succinyl-CoA | 4-hydroxy- | succinyl-CoA | adhE2 | AAK09379.1 | Clostridium | butanoyl-CoA |
| | | | butyrate | reductase | | | acetobutylicum | |
| | | | | (alcohol | | | | |
| | | | | forming) | | | | |
| | | | | | mcr | AAS20429.1 | Chloroflexus | malonyl-CoA |
| | | | | | | | aurantiacus | |
| | | | | | FAR | AAD38039.1 | Simmondsia chinensis | long chain acyl- |
| | | | | | | | | CoA |
| 8A | 2.8.3.a | 4-hydroxy- | 4-hydroxy | 4- | cat1, cat2, | P38946.1, | Clostridium kluyveri | succinate, 4- |
| | | butyrate | butyryl-CoA | hydroxybutyryl- | cat3 | P38942.2, | | hydroxybutyrate, |
| | | | | CoA | | EDK35586.1 | | butyrate |
| | | | | transferase | gctA, gctB | CAA57199.1, | Acidaminococcus | glutarate |
| | | | | | | CAA57200.1 | fermentans | |
| | | | | | atoA, atoD | P76459.1, | Escherichia coli | butanoate |
| | | | | | | P76458.1 | | |
| 8A | 3.1.2.a | 4-hydroxy- | 4-hydroxy- | 4-hydroxybutyryl- | tesB | NP_414986 | Escherichia coli | adipyl-CoA |
| | | butyrate | butyryl-CoA | CoA hydrolase | | | | |
| | | | | | acot12 | NP_570103.1 | Rattus norvegicus | butyryl-CoA |
| | | | | | hibch | Q6NVY1.2 | Homo sapiens | 3- |
| | | | | | | | | hydroxypropanoyl- |
| | | | | | | | | CoA |
| 8A | 6.2.1.a | 4-hydroxy- | 4-hydroxy- | 4-hydroxybutyryl- | sucCD | NP_415256.1, | Escherichia coli | succinate |
| | | butyrate | butyryl-CoA | CoA ligase (or 4- | | AAC73823.1 | | |
| | | | | hydroxybutyryl- | | | | |
| | | | | CoA synthetase) | | | | |
| | | | | | phl | CAJ15517.1 | Penicillium | phenylacetate |
| | | | | | | | chrysogenum | |
| | | | | | bioW | NP_390902.2 | Bacillus subtilis | 6-carboxyhexanoate |
| 8A | 2.7.2.a | 4-hydroxy- | 4-hydroxy- | 4- | ackA | NP_416799.1 | Escherichia coli | acetate, |
| | | butyrate | butyryl- | hydroxybutyrate | | | | propionate |
| | | | phosphate | kinase | | | | |
| | | | | | buk1 | NP_349675 | Clostridium | butyrate |
| | | | | | | | acetobutylicum | |
| | | | | | buk2 | Q97II1 | Clostridium | butyrate |
| | | | | | | | acetobutylicum | |
| 8A | 2.3.1.a | 4-hydroxy- | 4-hydroxy- | phosphotrans-4- | ptb | NP_349676 | Clostridium | butyryl-phosphate |
| | | butyryl- | butyryl- | hydroxy- | | | acetobutylicum | |
| | | phosphate | CoA | butyrylase | | | | |
| | | | | | ptb | AAR19757.1 | butyrate-producing | butyryl-phosphate |
| | | | | | | | bacterium L2-50 | |
| | | | | | ptb | CAC07932.1 | Bacillus megaterium | butyryl-phosphate |
| 8A | 1.2.1.d | 4-hydroxy- | 4-hydroxy- | 4-hydroxybutanal | asd | NP_417891.1 | Escherichia coli | L-4-aspartyl- |
| | | butyryl- | butanal | dehydrogenase | | | | phosphate |
| | | phosphate | | (phosphorylating) | | | | |
| | | | | | proA | NP_414778.1 | Escherichia coli | L-glutamyl-5- |
| | | | | | | | | phospate |
| | | | | | gapA | P0A9B2.2 | Escherichia coli | Glyceraldehyde- |
| | | | | | | | | 3-phosphate |
| 8A | 1.2.1.b | 4-hydroxy- | 4-hydroxy- | 4-hydroxybutyryl- | sucD | P38947.1 | Clostridium kluyveri | succinyl-CoA |
| | | butyryl- | butanal | CoA | | | | |
| | | CoA | | reductase (or 4- | | | | |
| | | | | hydroxybutanal | | | | |
| | | | | dehydrogenase) | | | | |
| | | | | | sucD | NP_904963.1 | Porphyromonas | succinyl-CoA |
| | | | | | | | gingivalis | |
| | | | | | Msed_0709 | YP_001190808.1 | Metallosphaera sedula | malonyl-CoA |
| 8A | 1.1.1.c | 4-hydroxy- | 1,4-butanediol | 4-hydroxybutyryl- | adhE2 | AAK09379.1 | Clostridium | butanoyl-CoA |
| | | butyryl- | | CoA | | | acetobutylicum | |
| | | CoA | | reductase (alcohol | | | | |
| | | | | forming) | | | | |
| | | | | | mcr | AAS20429.1 | Chloroflexus | malonyl-CoA |
| | | | | | | | aurantiacus | |
| | | | | | FAR | AAD38039.1 | Simmondsia chinensis | long chain acyl- |
| | | | | | | | | CoA |
| 8A | 1.1.1.a | 4-hydroxy- | 1,4-butanediol | 1,4-butanediol | ADH2 | NP_014032.1 | Saccharymyces | general |
| | | butanal | | dehydrogenase | | | cerevisiae | |
| | | | | | yqhD | NP_417484.1 | Escherichia coli | >C3 |
| | | | | | 4hbd | L21902.1 | Clostridium kluyveri | Succinate |
| | | | | | | | DSM 555 | semialdehyde |

### Example VI

### Additional Exemplary BDO Pathways from Alpha-Ketoglutarate

[0548] This example describes exemplary BDO pathways from alpha-ketoglutarate. BDO pathways from succinyl-CoA are described herein and have been described previously (see U.S. application Ser. No. 12/049,256, filed Mar. 14, 2008 (US publication 20090075351) and PCT application serial No. US08/57168, filed Mar. 14, 2008 (WO/2008/115840), each of which is incorporated herein by reference). Additional pathways are shown in FIG. 8B. Enzymes of such exemplary BDO pathways are listed in Table 16, along with exemplary genes encoding these enzymes.

[0549] Briefly, alpha-ketoglutarate can be converted to succinic semialdehyde by alpha-ketoglutarate decarboxylase (EC 4.1.1.a), as previously described. Alternatively, alpha-ketoglutarate can be converted to glutamate by glutamate dehydrogenase (EC 1.4.1.a). 4-Aminobutyrate can be converted to succinic semialdehyde by 4-aminobutyrate oxidoreductase (deaminating) (EC 1.4.1.a) or 4-aminobutyrate transaminase (EC 2.6.1.a). Glutamate can be converted to 4-aminobutyrate by glutamate decarboxylase (EC 4.1.1.a). Succinate semialdehyde can be converted to 4-hydroxybutyrate by 4-hydroxybutyrate dehydrogenase (EC 1.1.1.a), as previously described. 4-Hydroxybutyrate can be converted to 4-hydroxybutyryl-CoA by 4-hydroxybutyryl-CoA transferase (EC 2.8.3.a), as previously described, or by 4-hydroxybutyryl-CoA hydrolase (EC 3.1.2.a), or 4-hydroxybutyryl-CoA ligase (or 4-hydroxybutyryl-CoA synthetase) (EC 6.2.1.a). 4-Hydroxybutyrate can be converted to 4-hydroxybutyryl-phosphate by 4-hydroxybutyrate kinase (EC 2.7.2.a). 4-Hydroxybutyryl-phosphate can be converted to 4-hydroxybutyryl-CoA by phosphotrans-4-hydroxybutyrylase (EC 2.3.1.a), as previously described. Alternatively, 4-hydroxybutyryl-phosphate can be converted to 4-hydroxybutanal by 4-hydroxybutanal dehydrogenase (phosphorylating) (EC 1.2.1.d). 4-Hydroxybutyryl-CoA can be converted to 4-hydroxybutanal by 4-hydroxybutyryl-CoA reductase (or 4-hydroxybutanal dehydrogenase) (EC 1.2.1.b), as previously described. 4-Hydroxybutyryl-CoA can be converted to 1,4-butanediol by 4-hydroxybutyryl-CoA reductase (alcohol forming) (EC 1.1.1.c). 4-Hydroxybutanal can be converted to 1,4-butanediol by 1,4-butanediol dehydrogenase (EC 1.1.1.a), as previously described.

TABLE 16
BDO pathway from alpha-ketoglutarate.

| | | Desired | Desired | | | GenBank ID | | Known |
|---|---|---|---|---|---|---|---|---|
| FIG. | EC class | substrate | product | Enzyme name | Gene name | (if available) | Organism | Substrates |
| 8B | 4.1.1.a | alpha- | succinic | alpha- | kgd | O50463.4 | Mycobacterium | alpha- |
| | | ketoglutarate | semialdehyde | ketoglutarate | | | tuberculosis | ketoglutarate |
| | | | | decarboxylase | | | | |
| | | | | | gadA | NP_417974 | Escherichia coli | glutamate |
| | | | | | gadB | NP_416010 | Escherichia coli | glutamate |
| 8B | 1.4.1.a | alpha- | glutamate | glutamate | gdhA | P00370 | Escherichia coli | glutamate |
| | | ketoglutarate | | dehydrogenase | | | | |
| | | | | | gdh | P96110.4 | Thermotoga | glutamate |
| | | | | | | | maritima | |
| | | | | | gdhA1 | NP_279651.1 | Halobacterium | glutamate |
| | | | | | | | salinarum | |
| 8B | 1.4.1.a | 4-amino- | succinic | 4-aminobutyrate | lysDH | AB052732 | Geobacillus | lysine |
| | | butyrate | semialdehyde | oxidoreductase | | | stearothermo- | |
| | | | | (deaminating) | | | philus | |
| | | | | | lysDH | NP_147035.1 | Aeropyrum | lysine |
| | | | | | | | pernix K1 | |
| | | | | | ldh | P0A393 | Bacillus cereus | leucine, |
| | | | | | | | | isoleucine, |
| | | | | | | | | valine, 2- |
| | | | | | | | | aminobutanoate |
| 8B | 2.6.1.a | 4-amino- | succinic | 4-aminobutyrate | gabT | P22256.1 | Escherichia coli | 4- |
| | | butyrate | semialdehyde | transaminase | | | | aminobutyryate |
| | | | | | puuE | NP_415818.1 | Escherichia coli | 4- |
| | | | | | | | | aminobutyryate |
| | | | | | UGA1 | NP_011533.1 | Saccharomyces | 4- |
| | | | | | | | cerevisiae | aminobutyryate |
| 8B | 4.1.1.a | glutamate | 4-amino- | glutamate | gadA | NP_417974 | Escherichia coli | glutamate |
| | | | butyrate | decarboxylase | | | | |
| | | | | | gadB | NP_416010 | Escherichia coli | glutamate |
| | | | | | kgd | O50463.4 | Mycobacterium | alpha- |
| | | | | | | | tuberculosis | ketoglutarate |
| 8B | 1.1.1.a | succinate | 4-hydroxy- | 4- | 4hbd | YP_726053.1 | Ralstonia | 4- |
| | | semialdehyde | butyrate | hydroxybutyrate | | | eutropha H16 | hydroxybutyrate |
| | | | | dehydrogenase | | | | |
| | | | | | 4hbd | L21902.1 | Clostridium | 4- |
| | | | | | | | kluyveri | hydroxybutyrate |
| | | | | | | | DSM 555 | |
| | | | | | 4hbd | Q94B07 | Arabidopsis | 4- |
| | | | | | | | thaliana | hydroxybutyrate |
| 8B | 2.8.3.a | 4-hydroxy- | 4-hydroxy- | 4-hydroxybutyryl- | cat1, cat2, | P38946.1, | Clostridium | succinate, 4- |
| | | butyrate | butyryl- | CoA transferase | cat3 | P38942.2, | kluyveri | hydroxybutyrate, |
| | | | CoA | | | EDK35586.1 | | butyrate |
| | | | | | gctA, gctB | CAA57199.1, | Acidaminococcus | glutarate |
| | | | | | | CAA57200.1 | fermentans | |
| | | | | | atoA, atoD | P76459.1, | Escherichia coli | butanoate |
| | | | | | | P76458.1 | | |
| 8B | 3.1.2.a | 4-hydroxy- | 4-hydroxy- | 4-hydroxybutyryl- | tesB | NP_414986 | Escherichia coli | adipyl-CoA |
| | | butyrate | butyryl-CoA | CoA hydrolase | | | | |
| | | | | | acot12 | NP_570103.1 | Rattus norvegicus | butyryl-CoA |
| | | | | | hibch | Q6NVY1.2 | Homo sapiens | 3- |
| | | | | | | | | hydroxypropanoyl- |
| | | | | | | | | CoA |
| 8B | 6.2.1.a | 4-hydroxy- | 4-hydroxy- | 4-hydroxybutyryl- | sucCD | NP_415256.1, | Escherichia coli | succinate |
| | | butyrate | butyryl-CoA | CoA ligase (or 4- | | AAC73823.1 | | |
| | | | | hydroxybutyryl- | | | | |
| | | | | CoA synthetase) | | | | |
| | | | | | phl | CAJ15517.1 | Penicillium | phenylacetate |
| | | | | | | | chrysogenum | |
| | | | | | bioW | NP_390902.2 | Bacillus subtilis | 6- |
| | | | | | | | | carboxyhexanoate |
| 8B | 2.7.2.a | 4-hydroxy- | 4-hydroxy- | 4- | ackA | NP_416799.1 | Escherichia coli | acetate, |
| | | butyrate | butyryl- | hydroxybutyrate | | | | propionate |
| | | | phosphate | kinase | | | | |
| | | | | | buk1 | NP_349675 | Clostridium | butyrate |
| | | | | | | | acetobutylicum | |
| | | | | | buk2 | Q97II1 | Clostridium | butyrate |
| | | | | | | | acetobutylicum | |
| 8B | 2.3.1.a | 4-hydroxy- | 4-hydroxy- | phosphotrans-4- | ptb | NP_349676 | Clostridium | butyryl- |
| | | butyryl- | butyryl- | hydroxybutyrylase | | | acetobutylicum | phosphate |
| | | phosphate | CoA | | | | | |
| | | | | | ptb | AAR19757.1 | butyrate- | butyryl- |
| | | | | | | | producing | phosphate |
| | | | | | | | bacterium L2-50 | |
| | | | | | ptb | CAC07932.1 | Bacillus | butyryl- |
| | | | | | | | megaterium | phosphate |
| 8B | 1.2.1.d | 4-hydroxy- | 4-hydroxy- | 4-hydroxybutanal | asd | NP_417891.1 | Escherichia coli | L-4-aspartyl- |
| | | butyryl- | butanal | dehydrogenase | | | | phosphate |
| | | phosphate | | (phosphorylating) | | | | |
| | | | | | proA | NP_414778.1 | Escherichia coli | L-glutamyl-5- |
| | | | | | | | | phospate |
| | | | | | gapA | P0A9B2.2 | Escherichia coli | Glyceraldehyde- |
| | | | | | | | | 3-phosphate |
| 8B | 1.2.1.b | 4-hydroxy- | 4-hydroxy- | 4-hydroxybutyryl- | sucD | P38947.1 | Clostridium | succinyl-CoA |
| | | butyryl- | butanal | CoA reductase (or | | | kluyveri | |
| | | CoA | | 4-hydroxybutanal | | | | |
| | | | | dehydrogenase) | | | | |
| | | | | | sucD | NP_904963.1 | Porphyromonas | succinyl-CoA |
| | | | | | | | gingivalis | |
| | | | | | Msed_0709 | YP_001190808.1 | Metallosphaera | malonyl-CoA |
| | | | | | | | sedula | |
| 8B | 1.1.1.c | 4-hydroxy- | 1,4-butanediol | 4-hydroxybutyryl- | adhE2 | AAK09379.1 | Clostridium | butanoyl-CoA |
| | | butyryl-CoA | | CoA reductase | | | acetobutylicum | |
| | | | | (alcohol forming) | | | | |
| | | | | | mcr | AAS20429.1 | Chloroflexus | malonyl-CoA |
| | | | | | | | aurantiacus | |
| | | | | | FAR | AAD38039.1 | Simmondsia | long chain acyl- |
| | | | | | | | chinensis | CoA |
| 8B | 1.1.1.a | 4-hydroxy- | 1,4-butanediol | 1,4-butanediol | ADH2 | NP_014032.1 | Saccharymyces | general |
| | | butanal | | dehydrogenase | | | cerevisiae | |
| | | | | | yqhD | NP_417484.1 | Escherichia coli | >C3 |
| | | | | | 4hbd | L21902.1 | Clostridium | Succinate |
| | | | | | | | kluyveri DSM | semialdehyde |
| | | | | | | | 555 | |

### Example VII

### BDO Pathways from 4-Aminobutyrate

[0550] This example describes exemplary BDO pathway from 4-aminobutyrate. See corresponding Example in WO2013/184602 and FIGS. 9A and 9B. FIG. 9C shows an exemplary pathway through acetoacetate.

### Example VIII

### Exemplary BDO Pathways from Alpha-Ketoglutarate

[0551] This example describes exemplary BDO pathways from alpha-ketoglutarate. See corresponding example in WO2013/186402 and FIG. 10.

### Example IX

[0552] Exemplary BDO Pathways from Glutamate

[0553] This example describes exemplary BDO pathways from glutamate. See corresponding example in WO2013/186402 and FIG. 11.

### Example X

### Exemplary BDO from Acetoacetyl-CoA

[0554] This example describes an exemplary BDO pathway from acetoacetyl-CoA. See corresponding example in WO2013/186402 and FIG. 12.

### Example XI

### Exemplary BDO Pathway from Homoserine

[0555] This example describes an exemplary BDO pathway from homoserine. See corresponding example in WO2013/186402 and FIG. 13.

### Example XII

### BDO Producing Strains Expressing Succinyl-CoA Synthetase

[0556] This example describes increased production of BDO in BDO producing strains expressing succinyl-CoA synthetase. See corresponding example in WO2013/186402. The nucleotide sequence of the E. coli sucCD operon is shown in FIG. 14A, and the amino acid sequences for the encoded succinyl-CoA synthetase subunits are shown in FIGS. 14B and 14C.

[0557] The E. coli sucCD genes, which encode the succinyl-CoA synthetase, were overexpressed. The results showed that introducing into the strains sucCD to express succinyl-CoA synthetase improved BDO production in various strains compared to either native levels of expression or expression of cat1, which is a succinyl-CoA/acetyl-CoA transferase. Thus, BDO production was improved by overexpressing the native E. coli sucCD genes encoding succinyl-CoA synthetase.

### Example XIII

### Expression of Heterologous Genes Encoding BDO Pathway Enzymes

[0558] This example describes the expression of various non-native pathway enzymes to provide improved production of BDO. See corresponding Example in WO2013/184602.

[0559] Alpha-Ketoglutarate Decarboxylase.

[0560] The Mycobacterium bovis sucA gene encoding alpha-ketoglutarate decarboxylase was expressed in host strains. Overexpression of M. bovis sucA improved BDO production (see also WO2008/115840, WO 2009/023493, U.S. publication 2009/0047719, U.S. publication 2009/0075351). The nucleotide and amino acid sequences of M. bovis sucA and the encoded alpha-ketoglutarate decarboxylase are shown in FIG. 15.

[0561] To construct the M. bovis sucA expressing strains, fragments of the sucA gene encoding the alpha-ketoglutarate decarboxylase were amplified from the genomic DNA of Mycobacterium bovis BCG (ATCC 19015; American Type Culture Collection, Manassas Va.) using primers shown below. The full-length gene was assembled by ligation reaction of the four amplified DNA fragments, and cloned into expression vectors pZS*13 and pZE23 behind the P_{AllacO-1} promoter (Lutz and Bujard, Nucleic Acids Res. 25:1203-1210 (1997)). The nucleotide sequence of the assembled gene was verified by DNA sequencing.

Primers for fragment 1:
(SEQ ID NO: 3)
5′-ATGTACCGCAAGTTCCGC-3′;
(SEQ ID NO: 4)
5′-CAATTTGCCGATGCCCAG-3′
Primers for fragment 2:
(SEQ ID NO: 5)
5′-GCTGACCACTGAAGACTTTG-3′;
(SEQ ID NO: 6)
5′-GATCAGGGCTTCGGTGTAG-3′
Primers for fragment 3:
(SEQ ID NO: 7)
5′-TTGGTGCGGGCCAAGCAGGATCTGCTC-3′;
(SEQ ID NO: 8)
5′-TCAGCCGAACGCCTCGTCGAGGATCTCCTG-3′
Primers for fragment 4:
(SEQ ID NO: 9)
5′-TGGCCAACATAAGTTCACCATTCGGGCAAAAC-3′;
(SEQ ID NO: 10)
5′-TCTCTTCAACCAGCCATTCGTTTTGCCCG-3′

[0562] Functional expression of the alpha-ketoglutarate decarboxylase was demonstrated using both in vitro and in vivo assays. The SucA enzyme activity was measured by following a previously reported method (Tian et al., Proc. Natl. Acad. Sci. USA 102:10670-10675 (2005)). The reaction mixture contained 50 mM potassium phosphate buffer, pH 7.0, 0.2 mM thiamine pyrophosphate, 1 mM MgCl₂, 0.8 mM ferricyanide, 1 mM alpha-ketoglutarate and cell crude lysate. The enzyme activity was monitored by the reduction of ferricyanide at 430 nm. The in vivo function of the SucA enzyme was verified using E. coli whole-cell culture. Single colonies of E. coli MG 1655 lacI^{q} transformed with plasmids encoding the SucA enzyme and the 4-hydroxybutyrate dehydrogenase (4Hbd) was inoculated into 5 mL of LB medium containing appropriate antibiotics. The cells were cultured at 37° C. overnight aerobically. A 200 uL of this overnight culture was introduced into 8 mL of M9 minimal medium (6.78 g/L Na₂HPO₄, 3.0 g/L KH₂PO₄, 0.5 g/L NaCl, 1.0 g/L NH₄Cl, 1 mM MgSO₄, 0.1 mM CaCl₂) supplemented with 20 g/L glucose, 100 mM 3-(N-morpholino)propanesulfonic acid (MOPS) to improve the buffering capacity, 10 μg/mL thiamine, and the appropriate antibiotics. Microaerobic conditions were established by initially flushing capped anaerobic bottles with nitrogen for 5 minutes, then piercing the septum with a 23G needle following inoculation. The needle was kept in the bottle during growth to allow a small amount of air to enter the bottles. The protein expression was induced with 0.2 mM isopropyl β-D-1-thiogalactopyranoside (IPTG) when the culture reached mid-log growth phase. As controls, E. coli MG 1655 lacI^{q} strains transformed with only the plasmid encoding the 4-hydroxybutyrate dehydrogenase and only the empty vectors were cultured under the same condition (see Table 17). The accumulation of 4-hydroxybutyrate (4HB) in the culture medium was monitored using LCMS method. Only the E. coli strain expressing the Mycobacterium alpha-ketoglutarate decarboxylase produced significant amount of 4HB (see FIG. 16).

TABLE 17
Three strains containing various plasmid controls and encoding sucA and
4-hydroxybutyrate dehydrogenase.

| | Host | pZE13 | pZA33 |
|---|---|---|---|
| 1 | MG1655 laclq | vector | vector |
| 2 | MG1655 laclq | vector | 4hbd |
| 3 | MG1655 laclq | sucA | 4hbd |

[0563] A separate experiment demonstrated that the alpha-ketoglutarate decarboxylase pathway functions independently of the reductive TCA cycle. E. coli strain ECKh-401 (ΔadhE ΔldhA ΔpflB ΔlpdA::K.p.lpdA322 Δmdh ΔarcA) was used as the host strain. All the three constructs contained the gene encoding 4HB dehydrogenase (4Hbd). Construct 1 also contained the gene encoding the alpha-ketoglutarate decarboxylase (sucA). Construct 2 contained the genes encoding the succinyl-CoA synthetase (sucCD) and the CoA-dependent succinate semialdehyde dehydrogenase (sucD), which are required for the synthesis of 4HB via the reductive TCA cycle. Construct 3 contains all the genes from 1 and 2. The three E. coli strains were cultured under the same conditions as described above except the second culture was under the micro-aerobic condition. By expressing the SucA enzyme, construct 3 produced more 4HB than construct 2, which relies on the reductive TCA cycle for 4HB synthesis (see FIG. 17).

[0564] Succinate Semialdehyde Dehydrogenase (CoA-Dependent), 4-Hydroxybutyrate Dehydrogenase, and 4-Hydroxybutyryl-CoA/Acetyl-CoA Transferase.

[0565] The genes from Porphyromonas gingivalis W83 can be effective components of the pathway for 1,4-butanediol production (see also WO2008/115840, WO 2009/023493, U.S. publication 2009/0047719, U.S. publication 2009/0075351). The nucleotide sequence of CoA-dependent succinate semialdehyde dehydrogenase (sucD) from Porphyromonas gingivalis is shown in FIG. 18A, and the encoded amino acid sequence is shown in FIG. 18B. The nucleotide sequence of 4-hydroxybutyrate dehydrogenase (4hbd) from Porphymonas gingivalis is shown in FIG. 19A, and the encoded amino acid sequence is shown in FIG. 19B. The nucleotide sequence of 4-hydroxybutyrate CoA transferase (cat2) from Porphyromonas gingivalis is shown in FIG. 20A, and the encoded amino acid sequence is shown in FIG. 20B.

[0566] Briefly, the genes from Porphyromonas gingivalis W83 encoding succinate semialdehyde dehydrogenase (CoA-dependent) and 4-hydroxybutyrate dehydrogenase, and in some cases additionally 4-hydroxybutyryl-CoA/acetyl-CoA, were cloned by PCR from P. gingivalis chromosomal DNA and introduced into multicopy plasmids pZS*13, pZA13, and pZE33 behind the PA1lacO-1 promoter (Lutz and Bujard, Nucleic Acids Res. 25:1203-1210 (1997)) using standard molecular biology procedures. These plasmids were then introduced into host strains.

[0567] The Porphyromonas gingivalis W83 genes were introduced into production strains as described above. Some strains included only succinate semialdehyde dehydrogenase (CoA-dependant) and 4-hydroxybutyrate dehydrogenase without 4-hydroxybutyryl-CoA/acetyl-CoA transferase.

[0568] Butyrate Kinase and Phosphotransbutyrylase.

[0569] Butyrate kinase (BK) and phosphotransbutyrylase (PTB) enzymes can be utilized to produce 4-hydroxybutyryl-CoA (see also WO2008/115840, WO 2009/023493, U.S. publication 2009/0047719, U.S. publication 2009/0075351). In particular, the Clostridium acetobutylicum genes, buk1 and ptb, can be utilized as part of a functional BDO pathway.

[0570] Initial experiments involved the cloning and expression of the native C. acetobutylicum PTB (020) and BK (021) genes in E. coli. Where required, the start codon and stop codon for each gene were modified to “ATG” and “TAA,” respectively, for more optimal expression in E. coli. The C. acetobutylicum gene sequences (020N and 021N) and their corresponding translated peptide sequences are shown in FIGS. 21 and 22.

[0571] The PTB and BK genes exist in C. acetobutylicum as an operon, with the PTB (020) gene expressed first. The two genes are connected by the sequence “atta aagttaagtg gaggaatgtt aac” (SEQ ID NO:11) that includes a re-initiation ribosomal binding site for the downstream BK (021) gene. The two genes in this context were fused to lac-controlled promoters in expression vectors for expression in E. coli (Lutz and Bujard, Nucleic Acids Res. 25:1203-1210 (1997)).

[0572] Expression of the two proteins from these vector constructs was found to be low in comparison with other exogenously expressed genes due to the high incidence of codons in the C. acetobutylicum genes that occur only rarely in E. coli. Therefore new 020 and 021 genes were predicted that changed rare codons for alternates that are more highly represented in E. coli gene sequences. This method of codon optimization followed algorithms described previously (Sivaraman et al., Nucleic Acids Res. 36:e16(2008)). This method predicts codon replacements in context with their frequency of occurrence when flanked by certain codons on either side. Alternative gene sequences for 020 (FIG. 23) and 021 (FIG. 24) were determined in which increasing numbers of rare codons were replaced by more prevalent codons (A<B<C<D) based on their incidence in the neighboring codon context. No changes in actual peptide sequence compared to the native 020 and 021 peptide sequences were introduced in these predicted sequences.

[0573] The improvement in expression of the BK and PTB proteins resulting from codon optimization is shown in FIG. 25A. Expression of the native gene sequences is shown in lane 2, while expression of the 020B-021B and 020C-021 C is shown in lanes 3 and 4, respectively. Higher levels of protein expression in the codon-optimized operons 020B-021B (2021B) and 020C-021C (2021C) also resulted in increased activity compared to the native operon (2021n) in equivalently-expressed E. coli crude extracts (FIG. 25B).

[0574] The codon optimized operons were expressed on a plasmid in strain ECKh-432 (ΔadhE ΔldhA ΔpflB ΔlpdA::K.p.lpdA322 Δmdh ΔarcA gltAR163L fimD:: E. coli sucCD, P. gingivalis sucD, P. gingivalis 4hbd fimD:: M. bovis sucA, C. kluyveri 4hbd) along with the C. acetobutylicum aldehyde dehydrogenase to provide a complete BDO pathway. Cells were cultured in M9 minimal medium containing 20 g/L glucose, using a 23G needle to maintain microaerobic conditions as described above. The resulting conversion of glucose to the final product BDO was measured. Also measured was the accumulation of gamma-butyrylactone (GBL), which is a spontaneously rearranged molecule derived from 4Hb-CoA, the immediate product of the PTB-BK enzyme pair. FIG. 26 shows that expression of the native 2021n operon resulted in comparable BDO levels to an alternative enzyme function, Cat2 (034), that is capable of converting 4HB and free CoA to 4HB-CoA. GBL levels of 034 were significantly higher than 2021n, suggesting that the former enzyme has more activity than PTB-BK expressed from the native genes. However levels of both BDO and GBL were higher than either 034 or 2021n when the codon-optimized variants 2021B and 2021C were expressed, indicating that codon optimization of the genes for PTB and BK significantly increases their contributions to BDO synthesis in E. coli.

[0575] These results demonstrate that butyrate kinase (BK) and phosphotransbutyrylase (PTB) enzymes can be employed to convert 4-hydroxybutyrate to 4-hydroxybutyryl-CoA. This eliminates the need for a transferase enzyme such as 4-hydoxybutyryl-CoA/Acetyl-CoA transferase, which would generate one mole of acetate per mol of 4-hydroxybutyryl-CoA produced. The enzymes from Clostridium acetobutylicum are present in a number of engineered strains for BDO production.

[0576] 4-Hydroxybutyryl-CoA Reductase.

[0577] The Clostridium beijerinckii ald gene can be utilized as part of a functional BDO pathway (see also WO2008/115840, WO 2009/023493, U.S. publication 2009/0047719, U.S. publication 2009/0075351). The Clostridium beijerinckii ald can also be utilized to lower ethanol production in BDO producing strains. Additionally, a specific codon-optimized ald variant (GNM0025B) was found to improve BDO production.

[0578] The native C. beijerinckii ald gene (025n) and the predicted protein sequence of the enzyme are shown in FIG. 27. As was seen for the Clostridium acetobutylicum PTB and BK genes, expression of the native C. beijerinckii ald gene was very low in E. coli. Therefore, four codon-optimized variants for this gene were predicted. FIGS. 28A-28D show alternative gene sequences for 025, in which increasing numbers of rare codons are replaced by more prevalent codons (A<B<C<D) based on their incidence in the neighboring codon context (25A, P=0.05; 25B, P=0.1; 25C, P=0.15; 25D, P=1). No changes in actual peptide sequence compared to the native 025 peptide sequence were introduced in these predictions. Codon optimization significantly increased expression of the C. beijerinckii ald (see FIG. 29), which resulted in significantly higher conversion of glucose to BDO in cells expressing the entire BDO pathway (FIG. 30A).

[0579] The native and codon-optimized genes were expressed on a plasmid along with P. gingivalis Cat2, in the host strain ECKh-432 (ΔadhE ΔldhA ΔpflB ΔlpdA::K.p.lpdA322 Δmdh ΔarcA gltAR163L ΔackA fimD:: E. coli sucCD, P. gingivalis sucD, P. gingivalis 4hbd fimD:: M. bovis sucA, C. kluyveri 4hbd), thus containing a complete BDO pathway. Cells were cultured microaerobically in M9 minimal medium containing 20 g/L glucose as described above. The relative production of BDO and ethanol by the C. beijerinckii Ald enzyme (expressed from codon-optimized variant gene 025B) was compared with the C. acetobutylicum AdhE2 enzyme (see FIG. 30B). The C. acetobutylicum AdhE2 enzyme (002C) produced nearly 4 times more ethanol than BDO. In comparison, the C. beijerinckii Ald (025B) (in conjunction with an endogenous ADH activity) produced equivalent amounts of BDO, yet the ratio of BDO to ethanol production was reversed for this enzyme compared to 002C. This suggests that the C. beijerinckii Ald is more specific for 4HB-CoA over acetyl-coA than the C. acetobutylicum AdhE2, and therefore the former is the preferred enzyme for inclusion in the BDO pathway.

[0580] The Clostridium beijerinckii ald gene (Toth et al., Appl. Environ. Microbiol. 65:4973-4980 (1999)) was tested as a candidate for catalyzing the conversion of 4-hydroxybutyryl-CoA to 4-hydroxybutanal. Over fifty aldehyde dehydrogenases were screened for their ability to catalyze the conversion of 4-hydroxybutyryl-CoA to 4-hydroxybutyraldehyde. The C. beijerinckii ald gene was chosen for implementation into BDO-producing strains due to the preference of this enzyme for 4-hydroxybutyryl-CoA as a substrate as opposed to acetyl-CoA. This is important because most other enzymes with aldehyde dehydrogenase functionality (for example, adhE2 from C. acetobutylicum (Fontaine et al., J Bacteriol. 184:821-830 (2002)) preferentially convert acetyl-CoA to acetaldehyde, which in turn is converted to ethanol. Utilization of the C. beijerinckii gene lowers the amount of ethanol produced as a byproduct in BDO-producing organisms. Also, a codon-optimized version of this gene expresses very well in E. coli (Sivaraman et al., Nucleic Acids Res. 36:e16 (2008)).

[0581] 4-Hydroxybutanal Reductase.

[0582] 4-hydroxybutanal reductase activity of adh1 from Geobacillus thermoglucosidasius (M10EXG) was utilized. This led to improved BDO production by increasing 4-hydroxybutanal reductase activity over endogenous levels.

[0583] Multiple alcohol dehydrogenases were screened for their ability to catalyze the reduction of 4-hydroxybutanal to BDO. Most alcohol dehydrogenases with high activity on butyraldehyde exhibited far lower activity on 4-hydroxybutyraldehyde. One notable exception is the adh1 gene from Geobacillus thermoglucosidasius M10EXG (Jeon et al., J. Biotechnol. 135:127-133 (2008)) (GNM0084), which exhibits high activity on both 4-hydroxybutanal and butanal.

[0584] The native gene sequence and encoded protein sequence if the adh1 gene from Geobacillus thermoglucosidasius are shown in FIG. 31. The G. thermoglucosidasius ald1 gene was expressed in E. coli.

[0585] The Adh1 enzyme (084) expressed very well from its native gene in E. coli (see FIG. 32A). In ADH enzyme assays, the E. coli expressed enzyme showed very high reductive activity when butyraldehyde or 4HB-aldehyde were used as the substrates (see FIG. 32B). The Km values determined for these substrates were 1.2 mM and 4.0 mM, respectively. These activity values showed that the Adh1 enzyme was the most active on reduction of 4HB-aldehyde of all the candidates tested.

[0586] The 084 enzyme was tested for its ability to boost BDO production when coupled with the C. beijerinckii ald. The 084 gene was inserted behind the C. beijerinckii ald variant 025B gene to create a synthetic operon that results in coupled expression of both genes. Similar constructs linked 025B with other ADH candidate genes, and the effect of including each ADH with 025B on BDO production was tested. The host strain used was ECKh-459 (ΔadhE ldhA ΔpflB ΔlpdA::fnr-pf1B6-K.p.lpdA322 Δmdh ΔarcA gltAR163L fimD:: E. coli sucCD, P. gingivalis sucD, P. gingivalis 4hbd fimD:: M. bovis sucA, C. kluyveri 4hbd fimD:: C. acetobutylicum buk1, C. acetobutylicum ptb), which contains the remainder of the BDO pathway on the chromosome. The 084 ADH expressed in conjunction with 025B showed the highest amount of BDO (right arrow in FIG. 33) when compared with 025B only (left arrow in FIG. 33) and in conjunction with endogenous ADH functions. It also produced more BDO than did other ADH enzymes when paired with 025B, indicated as follows: 026A-C, codon-optimized variants of Clostridium acetobutylicum butanol dehydrogenase; 050, Zymomonas mobilis alcohol dehydrogenase I; 052, Citrobacter freundii 1,3-propanediol dehydrogenase; 053, Lactobacillus brevis 1,3-propanediol dehydrogenase; 057, Bacteroides fragilis lactaldehyde reductase; 058, E. coli 1,3 propanediol dehydrogenase; 071, Bacillus subtilis 168 alpha-ketoglutarate semialdehyde dehydrogenase. The constructs labeled “PT5lacO” are those in which the genes are driven by the PT5lacO promoter. In all other cases, the PA1lacO-1 promoter was used. This shows that inclusion of the 084 ADH in the BDO pathway increased BDO production.

### Example XIV

### BDO Producing Strains Expressing Pyruvate Dehydrogenase

[0587] This example describes the utilization of pyruvate dehydrogenase (PDH) to enhance BDO production. Heterologous expression of the Klebsiella pneumonia lpdA gene was used to enhance BDO production. See corresponding example in WO2013/186402.

[0588] PDH is one of the most complicated enzymes of central metabolism and is comprised of 24 copies of pyruvate decarboxylase (E1) and 12 molecules of dihydrolipoyl dehydrogenase (E3), which bind to the outside of the dihydrolipoyl transacetylase (E2) core. PDH is inhibited by high NADH/NAD, ATP/ADP, and Acetyl-CoA/CoA ratios. The enzyme naturally exhibits very low activity under oxygen-limited or anaerobic conditions in organisms such as E. coli due in large part to the NADH sensitivity of E3, encoded by lpdA. To this end, an NADH-insensitive version of the lpdA gene from Klebsiella pneumonia was cloned and expressed to increase the activity of PDH under conditions where the NADH/NAD ratio is expected to be high.

[0589] Replacement of the Native lpdA.

[0590] The pyruvate dehydrogenase operon of Klebsiella pneumoniae is between 78 and 95% identical at the nucleotide level to the equivalent operon of E. coli. It was shown previously that K. pneumoniae has the ability to grow anaerobically in presence of glycerol (Menzel et al., J. Biotechnol. 56:135-142 (1997); Menzel et al., Biotechnol. Bioeng. 60:617-626 (1998)). It has also been shown that two mutations in the lpdA gene of the operon of E. coli would increase its ability to grow anaerobically (Kim et al., Appl. Environ. Microbiol. 73:1766-1771 (2007); Kim et al., J. Bacteriol. 190:3851-3858 (2008)). The lpdA gene of K. pneumonia was amplified by PCR using genomic DNA (ATCC700721D) as template and the primers KP-lpdA-Bam (5′-acacgcggatccaacgtcccgg-3′)(SEQ ID NO:12) and KP-lpdA-Nhe (5′-ageggctccgctagccgcttatg-3′)(SEQ ID NO:13). The resulting fragment was cloned into the vector pCR-BluntII-TOPO (Invitrogen; Carlsbad Calif.), leading to plasmid pCR-KP-lpdA.

[0591] The chromosomal gene replacement was performed using a non-replicative plasmid and the sacB gene from Bacillus subtilis as a means of counter selection (Gay et al., J. Bacteriol. 153:1424-1431 (1983)). The vector used is pRE118 (ATCC87693) deleted of the oriT and IS sequences, which is 3.6 kb in size and carrying the kanamycin resistance gene. The sequence was confirmed, and the vector was called pRE118-V2 (see FIG. 34).

[0592] The E. coli fragments flanking the lpdA gene were amplified by PCR using the combination of primers: EC-aceF-Pst (5′-aagccgttgctgcagctettgagc-3′)(SEQ ID NO:14)+EC-aceF-Bam2 (5′-atctccggeggteggatccgtcg-3′)(SEQ ID NO:15) and EC-yacH-Nhe (5′-aaageggctagccacgccgc-3′)(SEQ ID NO:16)+EC-yacH-Kpn (5′-attacacgaggtacccaacg-3)(SEQ ID NO:17). A BamHI-XbaI fragment containing the lpdA gene of K. pneumonia was isolated from plasmid pCR-KP-lpdA and was then ligated to the above E. coli fragments digested with PstI+BamHI and NheI-KpnI respectively, and the pRE118-V2 plasmid digested with KpnI and PstI. The resulting plasmid (called pRE118-M2.1 lpdA yac) was subjected to Site Directed Mutagenesis (SDM) using the combination of primers KP-lpdA-HisTyr-F (5′-atgctggcgtacaaaggtgtcc-3′)(SEQ ID NO:18) and (5′-ggacacctttgtacgccagcat-3′)(SEQ ID NO:19) for the mutation of the His 322 residue to a Tyr residue or primers KP-lpdA-GluLys-F (5′-atcgcctacactaaaccagaagtgg-3′)(SEQ ID NO:20) and KP-lpdA-GluLys-R (5′-ccacttctggtttagtgtaggcgat-3′)(SEQ ID NO:21) for the mutation of the residue Glu 354 to Lys residue. PCR was performed with the Polymerase Pfu Turbo (Stratagene; San Diego Calif.). The sequence of the entire fragment as well as the presence of only the desired mutations was verified. The resulting plasmid was introduced into electro competent cells of E. coli ΔadhE::Frt-ΔldhA::Frt by transformation. The first integration event in the chromosome was selected on LB agar plates containing Kanamycin (25 or 50 mg/L). Correct insertions were verified by PCR using 2 primers, one located outside the region of insertion and one in the kanamycin gene (5′-aggcagttccataggatggc-3′)(SEQ ID NO:22). Clones with the correct insertion were selected for resolution. They were sub-cultured twice in plain liquid LB at the desired temperature and serial dilutions were plated on LB-no salt-sucrose 10% plates. Clones that grew on sucrose containing plates were screened for the loss of the kanamycin resistance gene on LB-low salt agar medium and the lpdA gene replacement was verified by PCR and sequencing of the encompassing region. Sequence of the insertion region was verified, and is as described below. One clone (named 4-4-P1) with mutation Glu354Lys was selected. This clone was then transduced with P1 lysate of E. coli ΔPflB::Frt leading to strain ECKh-138 (AadhE ΔldhA ΔpflB ΔlpdA::K.p.lpdA322).

[0593] The sequence of the ECKh-138 region encompassing the aceF and lpdA genes is shown in FIG. 35. The K. pneumonia lpdA gene is underlined, and the codon changed in the Glu354Lys mutant shaded. The protein sequence comparison of the native E. coli lpdA and the mutant K. pneumonia lpdA is shown in FIG. 36.

[0594] To evaluate the benefit of using K. pneumoniae lpdA in a BDO production strain, the host strains AB3 and ECKh-138 were transformed with plasmids expressing the entire BDO pathway from strong, inducible promoters. Specifically, E. coli sucCD, P. gingivalis sucD, P. gingivalis 4hbd were expressed on the medium copy plasmid pZA33, and P. gingivalis Cat2 and C. acetobutylicum AdhE2 were expressed on the high copy plasmid pZE13. These plasmids have been described in the literature (Lutz and H. Bujard, Nucleic Acids Res 25:1203-1210 (1997)), and their use for BDO pathway expression is described in Example XIII and WO2008/115840. BDO and 4HB production in ECKh-138 was significantly higher after 48 hours than in AB3 or the host used in previous work, MG 1655 ΔldhA (FIG. 37).

[0595] PDH Promoter Replacement.

[0596] It was previously shown that the replacement of the pdhR repressor by a transcriptional fusion containing the Fnr binding site, one of the pflB promoters, and its ribosome binding site (RBS), thus leading to expression of the aceEF-lpd operon by an anaerobic promoter, should increase pdh activity anaerobically (Zhou et al., Biotechnol. Lett. 30:335-342 (2008)). A fusion containing the Fnr binding site, the pflB p6 promoter and an RBS binding site were constructed by overlapping PCR. Two fragments were amplified, one using the primers aceE-upstream-RC (5′-tgacatgtaacacctaccttctgtgcctgtgccagtggttgctgtgatatagaag-3′)(SEQ ID NO:23) and pflBp6-Up-Nde (5′-ataataatacatatgaaccatgcgagttacgggcctataagccaggcg-3)(SEQ ID NO:24) and the other using primers aceE-EcoRV-EC (5′-agtttttcgatatctgcatcagacaccggcacattgaaacgg-3′)(SEQ ID NO:25) and aceE-upstream (5′-ctggcacaggcacagaaggtaggtgttacatgtcagaacgtttacacaatgacgtggatc-3′)(SEQ ID NO:26). The tw fragments were assembled by overlapping PCR, and the final DNA fragment was digested with the restriction enzymes NdeI and BamHI. This fragment was subsequently introduced upstream of the aceE gene of the E. coli operon using pRE118-V2 as described above. The replacement was done in strains ECKh-138 and ECKh-422. The nucleotide sequence encompassing the 5′ region of the aceE gene was verified and is shown in FIG. 38. FIG. 38 shows the nucleotide sequence of 5′ end of the aceE gene fused to the pflB-p6 promoter and ribosome binding site (RBS). The 5′ italicized sequence shows the start of the aroP gene, which is transcribed in the opposite direction from the pdh operon. The 3′ italicized sequence shows the start of the aceE gene. In upper case: pflB RBS. Underlined: FNR binding site. In bold: pflB-p6 promoter sequence.

[0597] lpdA Promoter Replacement.

[0598] The promoter region containing the fnr binding site, the pflB-p6 promoter and the RBS of the pflB gene was amplified by PCR using chromosomal DNA template and primers aceF-pflBp6-fwd (5′-agacaaatcggttgccgtttgttaagccaggcgagatatgatctatatc-3′)(SEQ ID NO:27) and lpdA-RBS-B-rev (5′-gagttttgatttcagtactcatcatgtaacacctaccttcttgctgtgatatag-3′)(SEQ ID NO:28). Plasmid 2-4a was amplified by PCR using primers B-RBS-lpdA fwd (5′-ctatatcacagcaagaaggtaggtgttacatgatgagtactgaaatcaaaactc-3′)(SEQ ID NO:29) and pflBp6-aceF-rev (5′-gatatagatcatatctcgcctggcttaacaaacggcaaccgatttgtct-3′)(SEQ ID NO:30). The two resulting fragments were assembled using the BPS cloning kit (BPS Bioscience; San Diego Calif.). The resulting construct was sequenced verified and introduced into strain ECKh-439 using the pRE118-V2 method described above. The nucleotide sequence encompassing the aceF-lpdA region in the resulting strain ECKh-456 is shown in FIG. 39. 48 hours after induction with 0.2 mM IPTG, the concentrations of BDO, 4HB, and pyruvate were as shown in FIG. 40.

[0599] These results demonstrated that expression of pyruvate dehydrogenase increased production of BDO in BDO producing strains.

### Example XV

### BDO Producing Strains Expressing Citrate Synthase and Aconitase

[0600] This example describes increasing activity of citrate synthase and aconitase to increase production of BDO. An R163L mutation into gltA was found to improve BDO production. Additionally, an arcA knockout was used to improve BDO production. See corresponding example in WO2013/186402.

[0601] The following oligonucleotides were used to PCR amplify the chloramphenicol resistance gene (CAT) flanked by FRT sites from pKD3:

S-mdh-Kan 5′-TAT TGT GCA TAC AGA TGA ATT TTT ATG CAA ACA GTC AGC CCT GAA GAA GGG TGT AGG CTG GAG CTG CTT C-3′ (SEQ ID NO:31)
AS-mdh-Kan 5′-CAA AAA ACC GGA GTC TGT GCT CCG GTT TTT TAT TAT CCG CTA ATC AAT TAC ATA TGA ATA TCC TCC TTA G-3′ (SEQ ID NO:32). The PCR product was designed so that it integrated into the ECKh-138 genome at a region upstream of the mdh gene, as shown in FIG. 41.

[0602] The upstream and downstream regions of the arcA gene of E. coli MG1655 were amplified by PCR using primers ArcA-up-EcoRI (5′-ataataatagaattcgtttgctacctaaattgccaactaaatcgaaacagg-3′)(SEQ ID NO:33) with ArcA-up-KpnI (5′-tattattatggtaccaatatcatgcagcaaacggtgcaacattgccg-3′)(SEQ ID NO:34) and ArcA-down-EcoRI (5′-tgatctggaagaattcatcggctttaccaccgtcaaaaaaaacggcg-3′)(SEQ ID NO:35) with ArcA-down-Pst1 (5′-ataaaaccctgcageggaaacgaaglittatccatttttggttacctg-3′)(SEQ ID NO:36), respectively. After integration and resolution on LB-no salt-sucrose plates as described above, the deletion of the arcA gene in the chromosome of the resulting strain ECKh-401 was verified by sequencing and is shown in FIG. 42. The gltA gene of E. coli MG 1655 was amplified by PCR using primers gltA-up (5′-ggaagagaggctggtacccagaagccacagcagga-3′)(SEQ ID NO:37) and gltA-PstI (5′-gtaatcactgcgtaagcgccatgccccggcgttaattc-3′)(SEQ ID NO:38). The amplified fragment was cloned into pRE118-V2 after digestion with KpnI and Pst1. The resulting plasmid was called pRE118-gltA. This plasmid was then subjected to site directed mutagensis (SDM) using primers R163L-f (5′-attgccgcgttectectgctgtcga-3′)(SEQ ID NO:39) and R163L-r (5′-cgacagcaggaggaacgcggcaat-3′)(SEQ ID NO:40) to change the residue Arg163 to a Lys residue. The sequence of the entire fragment was verified by sequencing. The resulting strain was called ECKh-422, and has the genotype ΔadhE ΔldhA ΔpflB ΔlpdA::K.p.lpdA322 Δmdh ΔarcA gltAR163L. The region encompassing the mutated gltA gene of strain ECKh-422 was verified by sequencing, as shown in FIG. 43. FIG. 44 shows the citrate synthase activity of wild type gltA gene product and the R163L mutant. The assay was performed in the absence or presence of 0.4 mM NADH.

[0603] Strains ECKh-401 and ECKh-422 were transformed with plasmids expressing the entire BDO pathway. E. coli sucCD, P. gingivalis sucD, P. gingivalis 4hbd, and M. bovis sucA were expressed on the low copy plasmid pZS*13, and P. gingivalis Cat2 and C. acetobutylicum AdhE2 were expressed on the medium copy plasmid pZE23. Cultures of these strains were grown microaerobically in M9 minimal medium supplemented with 20 g/L glucose and the appropriate antibiotics as described above. The 4HB and BDO concentrations at 48 hours post-induction averaged from duplicate cultures are shown in FIG. 45. Both are higher in ECKh-422 than in ECKh-401, demonstrating that the enhanced citrate synthase activity due to the gltA mutation results in increased flux to the BDO pathway.

[0604] The host strain modifications described in this section were intended to redirect carbon flux through the oxidative TCA cycle, which is consistent with the OptKnock strain design described in WO 2009/023493 and U.S. publication 2009/0047719. To demonstrate that flux was indeed muted through this pathway, ¹³C flux analysis was performed using the strain ECKh-432, which is a version of ECKh-422 in which the upstream pathway is integrated into the chromosome (as described in Example XVII). To complete the BDO pathway, P. gingivalis Cat2 and C. beijerinckii Ald were expressed from pZS*13. Four parallel cultures were grown in M9 minimal medium (6.78 g/L Na₂HPO₄, 3.0 g/L KH₂PO₄, 0.5 g/L NaCl, 1.0 g/L NH₄Cl, 1 mM MgSO₄, 0.1 mM CaCl₂) containing 4 g/L total glucose of four different labeling ratios (¹⁻¹³C, only the first carbon atom in the glucose molecule is labeled with ¹³C; uniform ¹³C, all carbon atoms are ¹³C):

[0605] 1. 80 mol % unlabeled, 20 mol % uniform-¹³C

[0606] 2. 10 mol % unlabeled, 90 mol % uniform-¹³C

[0607] 3. 90 mol % ¹⁻¹³C, 10 mol % uniform-¹³C

[0608] 4. 40 mol % ¹⁻¹³C, 60 mol % uniform-¹³C

[0609] Parallel unlabeled cultures were grown in duplicate, from which frequent samples were taken to evaluate growth rate, glucose uptake rate, and product formation rates. In late exponential phase, the labeled cultures were harvested, the protein isolated and hydrolyzed to amino acids, and the label distribution of the amino acids analyzed by gas chromatography-mass spectrometry (GCMS) as described previously (Fischer and Sauer, Eur J. Biochem. 270:880-891 (2003)). In addition, the label distribution of the secreted 4HB and BDO in the broth from the labeled cultures was analyzed by GCMS as described in WO2008115840. This data was collectively used to calculate the intracellular flux distribution using established methods (Suthers et al., Metab. Eng. 9:387-405 (2007)). The resulting central metabolic fluxes and associated 95% confidence intervals are shown in FIG. 46. Values are molar fluxes normalized to a glucose uptake rate of 1 mmol/hr. The result indicates that carbon flux is muted through citrate synthase in the oxidative direction, and that most of the carbon enters the BDO pathway rather than completing the TCA cycle. Furthermore, it confirms there is essentially no flux between malate and oxaloacetate due to the mdh deletion in this strain.

[0610] The advantage of using a knockout strain such as strains designed using OptKnock for BDO production (see WO 2009/023493 and U.S. publication 2009/0047719) can be observed by comparing typical fermentation profiles of ECKh-422 with that of the original strain ECKh-138, in which BDO is produced from succinate via the reductive TCA cycle (see FIG. 47). Fermentations were performed with 1 L initial culture volume in 2 L Biostat B+ bioreactors (Sartorius; Cedex France) using M9 minimal medium supplemented with 20 g/L glucose. The temperature was controlled at 37° C., and the pH was controlled at 7.0 using 2 M NH₄OH or Na₂CO₃. Cells were grown aerobically to an OD600 of approximately 10, at which time the cultures were induced with 0.2 mM IPTG One hour following induction, the air flow rate was reduced to 0.02 standard liters per minute for microaerobic conditions. The agitation rate was set at 700 rpm. Concentrated glucose was fed to maintain glucose concentration in the vessel between 0.5 and 10 g/L. Both strains were transformed with plasmids bearing the entire BDO pathway, as in the examples above. In ECKh-138, acetate, pyruvate, and 4HB dominate the fermentation, while with ECKh-422 BDO is the major product.

### Example XVI

### BDO Strains Expression Phosphoenolpyruvate Carboxykinase

[0611] This example describes the utilization of phosphoenolpyruvate carboxykinase (PEPCK) to enhance BDO production. The Haemophilus influenza PEPCK gene was used for heterologous expression. See corresponding example in WO2013/186402.

[0612] Briefly, three non native PEPCK enzymes were tested for their ability to complement growth of a PPC mutant strain of E. coli in glucose minimal media: Haemophilus influenza (NC_{—}000907.1); Actinobacillus succinogenes (YP_{—}001343536.1); and Mannheimia succiniciproducens (YP_{—}089485.1). Haemophilus influenza PEPCK was integrated into the PPC locus of wild-type E. coli (MG1655)(sequence of this region shown in FIG. 48 (pepck coding region underlined). Techniques for adaptive evolution were applied to improve the growth rate of the E. coli mutant (Δppc::H. inf pepCK). Following evolution, individual colonies were isolated, and growth in anaerobic bottles was compared to that of the initial mutant and wild-type strain (see FIG. 49). The ppc/pepck gene replacement procedure described above was then repeated, this time using the BDO-producing strains ECKh-432 (ΔadhE ΔldhA ΔpflB ΔlpdA::K.p.lpdA322 Δmdh ΔarcA gltAR163L ΔackA fimD:: E. coli sucCD, P. gingivalis sucD, P. gingivalis 4hbd fimD:: M. bovis sucA, C. kluyveri 4hbd) and ECKh-439 as the hosts. The Δppc::H. inf pepCK derivative of ECKh-439, called ECKh-453, was run in a fermentation. The downstream BDO pathway was supplied by pZS*13 containing P. gingivalis Cat2 and C. beijerinckii Ald. The product profile is shown in FIG. 50. The growth coupling potential of ECKh-432 and ECKh-453 was evaluated by growth in microaerobic bottles with frequent sampling during the exponential phase. As shown in FIG. 51, ECKh-432 does not begin producing BDO until 5 g/L glucose has been consumed, corresponding to the onset of stationary phase. ECKh-453 produces BDO more evenly throughout the experiment.

### Example XVII

### Integration of BDO Pathway Encoding Genes at Specific Integration Sites

[0613] This example describes integration of various BDO pathway genes into the fimD locus to provide more efficient expression and stability. See corresponding example in WO2013/186402.

[0614] The entire upstream BDO pathway, leading to 4HB, has been integrated into the E. coli chromosome at the fimD locus. A polycistronic DNA fragment containing a promoter, the sucCD gene, the sucD gene and the 4hbd gene and a terminator sequence was inserted into the AflIII site of the pKD3 plasmid. The following primers were used to amplify the operon together with the chloramphenicol marker from the plasmid. The underlined sequences are homologeous to the target insertion site.

[0615] 5′-GTTTGCACGCTATAGCTGAGGTTGTTGTCTTC CAGCAACGTACCGTATACAA TAGGCGTATCACGAGGCCCTTTC-3′ (SEQ ID NO:41); 5′-GCTACAGCATGTCACACGATCTCAACGGTCGGATGACCAATCTGGCTGGTAT GGGAATTAGCCATGGTCC-3′ (SEQ ID NO:42). The nucleotide sequence of the region after insertion and marker removal is shown in FIG. 52. The alpha-ketoglutarate branch of the upstream pathway was integrated into the chromosome by homologeous recombination. The integration plasmid also contained a polycistronic sequence with a promoter, the sucA gene, the C. kluyveri 4hbd gene, and a terminator being inserted between two 1.5-kb DNA fragments that are homologeous to the flanking regions of the target insertion site. The nucleotide sequence of the chromosomal region after insertion and marker removal is shown in FIG. 53. The resulting upstream pathway integration strain ECKh-432 was transformed with a plasmid harboring the downstream pathway genes. The construct was able to produce BDO from glucose in minimal medium (see FIG. 54).

### Example XVIII

### Use of a Non-Phosphotransferase Sucrose Uptake System to Reduce Pyruvate Byproduct Formation

[0616] This example describes the utilization of a non-phosphotransferase (PTS) sucrose uptake system to reduce pyruvate as a byproduct in the conversion of sucrose to BDO. See corresponding example in WO2013/186402.

[0617] Strains engineered for the utilization of sucrose via a phosphotransferase (PTS) system produce significant amounts of pyruvate as a byproduct. Therefore, the use of a non-PTS sucrose system can be used to decrease pyruvate formation because the import of sucrose would not be accompanied by the conversion of phosphoenolpyruvate (PEP) to pyruvate. This will increase the PEP pool and the flux to oxaloacetate through PPC or PEPCK.

[0618] Insertion of a non-PTS sucrose operon into the n-nC region was performed. To generate a PCR product containing the non-PTS sucrose genes flanked by regions of homology to the rrnC region, two oligos were used to PCR amplify the csc genes from Mach1™ (Invitrogen, Carlsbad, Calif.). This strain is a descendent of W strain which is an E. coli strain known to be able to catabolize sucrose (Orencio-Trejo et al., Biotechnology Biofuels 1:8 (2008)). The sequence was derived from E. coli W strain KO11 (accession AY314757) (Shukla et al., Biotechnol. Lett. 26:689-693 (2004)) and includes genes encoding a sucrose permease (cscB), D-fructokinase (cscK), sucrose hydrolase (cscA), and a LacI-related sucrose-specific repressor (cscR)(see also CAA57217.1 for cscB, CAA57219.1 for cscA, and CAA57218.1 for cscK). The first 53 amino acids of cscR was effectively removed by the placement of the AS primer. The sequences of the oligos were: rmC 23S del S-CSC 5′-TGT GAG TGAAAG TCA CCT GCC TTAATATCT CAAAAC TCATCT TCG GGT GAC GAAATATGG CGT GAC TCG ATA C-3′ (SEQ ID NO:43) and rrnC 23S del AS-CSC 5′-TCT GTA TCA GGC TGAAAA TCT TCT CTC ATC CGC CAAAAC AGC TFC GGC GTT AAG ATG CGC GCT CAA GGA C-3′ (SEQ ID NO:44). Underlined regions indicate homology to the csc operon, and bold sequence refers to sequence homology upstream and downstream of the rrnC region. The sequence of the entire PCR product is shown in FIG. 55. The PCR product was designed so that it integrated into genome into the n-nC region of the chromosome, effectively deleting 191 nucleotides upstream of rrlC (23S rRNA), all of the rrlC rRNA gene and 3 nucleotides downstream of rrlC and replacing it with the sucrose operon, as shown in FIG. 56.

[0619] ECKh-463 was transformed with pZS*13 containing P. gingivalis Cat2 and C. beijerinckii Ald to provide a complete BDO pathway. Cells were cultured in M9 minimal medium (6.78 g/L Na₂HPO₄, 3.0 g/L KH₂PO₄, 0.5 g/L NaCl, 1.0 g/L NH₄Cl, 1 mM MgSO₄, 0.1 mM CaCl₂) supplemented with 10 g/L sucrose. 0.2 mM IPTG was present in the culture from the start. Anaerobic conditions were maintained using a bottle with 23G needle. As a control, ECKh-432 containing the same plasmid was cultured on the same medium, except with 10 g/L glucose instead of sucrose. FIG. 57 shows average product concentration, normalized to culture OD600, after 48 hours of growth. The data is for 6 replicate cultures of each strain. This demonstrates that BDO production from ECKh-463 on sucrose is similar to that of the parent strain on sucrose.

### Example XIX

### Summary of BDO Producing Strains

[0620] This example describes various BDO producing strains.

[0621] Table 18 summarizes various BDO producing strains disclosed above in Examples XII-XVIII.

TABLE 18
Summary of various BDO production strains.

| | Host | | | |
|---|---|---|---|---|
| Strain # | Strain # | Host chromosome | Host Description | Plasmid-based |
| 1 | | ΔldhA | Single deletion | E. coli sucCD, P. gingivalis |
| | | | derivative of E. coli | sucD, P. gingivalis 4hbd, P. gingivalis |
| | | | MG1655 | Cat2, C. acetobutylicum |
| | | | | AdhE2 |
| 2 | AB3 | ΔadhE ΔldhA ΔpflB | Succinate | E. coli sucCD, P. gingivalis |
| | | | producing strain; | sucD, P. gingivalis 4hbd, P. gingivalis |
| | | | derivative of E. coli | Cat2, C. acetobutylicum |
| | | | MG1655 | AdhE2 |
| 3 | ECKh- | ΔadhE ΔldhA ΔpflB | Improvement of | E. coli sucCD, P. gingivalis |
| | 138 | ΔlpdA::K.p.lpdA322 | lpdA to increase | sucD, P. gingivalis 4hbd, P. gingivalis |
| | | | pyruvate | Cat2, C. acetobutylicum |
| | | | dehydrogenase | AdhE2 |
| | | | flux | |
| 4 | ECKh- | ΔadhE ΔldhA ΔpflB | | E. coli sucCD, P. gingivalis |
| | 138 | ΔlpdA::K.p.lpdA322 | | sucD, P. gingivalis 4hbd, C. acetobutylicum |
| | | | | buk1, C. acetobutylicum |
| | | | | ptb, C. acetobutylicum |
| | | | | AdhE2 |
| 5 | ECKh- | ΔadhE ΔldhA ΔpflB | Deletions in mdh | E. coli sucCD, P. gingivalis |
| | 401 | ΔlpdA::K.p.lpdA322 Δmdh | and arcA to direct | sucD, P. gingivalis 4hbd, P. gingivalis |
| | | ΔarcA | flux through | Cat2, C. acetobutylicum |
| | | | oxidative TCA | AdhE2 |
| | | | cycle | |
| 6 | ECKh- | ΔadhE ΔldhA ΔpflB | | M. bovis sucA, E. coli sucCD, |
| | 401 | ΔlpdA::K.p.lpdA322 Δmdh | | P. gingivalis sucD, P. gingivalis |
| | | ΔarcA | | 4hbd, P. gingivalis |
| | | | | Cat2, C. acetobutylicum |
| | | | | AdhE2 |
| 7 | ECKh- | ΔadhE ΔldhA ΔpflB | Mutation in citrate | E. coli sucCD, P. gingivalis |
| | 422 | ΔlpdA::K.p.lpdA322 Δmdh | synthase to | sucD, P. gingivalis 4hbd, P. gingivalis |
| | | ΔarcA gltAR163L | improve anaerobic | Cat2, C. acetobutylicum |
| | | | activity | AdhE2 |
| 8 | ECKh- | ΔadhE ΔldhA ΔpflB | | M. bovis sucA, E. coli sucCD, |
| | 422 | ΔlpdA::K.p.lpdA322 Δmdh | | P. gingivalis sucD, P. gingivalis |
| | | ΔarcA gltAR163L | | 4hbd, P. gingivalis |
| | | | | Cat2, C. acetobutylicum |
| | | | | AdhE2 |
| 9 | ECKh- | ΔadhE ΔldhA ΔpflB | | M. bovis sucA, E. coli sucCD, |
| | 422 | ΔlpdA::K.p.lpdA322 Δmdh | | P. gingivalis sucD, P. gingivalis |
| | | ΔarcA gltAR163L | | 4hbd, P. gingivalis |
| | | | | Cat2, C. beijerinckii Ald |
| 10 | ECKh- | ΔadhE ΔldhA ΔpflB | Succinate branch | P. gingivalis Cat2, C. beijerinckii |
| | 426 | ΔlpdA::K.p.lpdA322 Δmdh | of upstream | Ald |
| | | ΔarcA gltAR163L fimD:: E. coli | pathway integrated | |
| | | sucCD, P. gingivalis sucD, P. gingivalis | into ECKh-422 | |
| | | 4hbd | | |
| 11 | ECKh- | ΔadhE ΔldhA ΔpflB | Succinate and | P. gingivalis Cat2, C. beijerinckii |
| | 432 | ΔlpdA::K.p.lpdA322 Δmdh | alpha-ketoglutarate | Ald |
| | | ΔarcA gltAR163L fimD:: E. coli | upstream pathway | |
| | | sucCD, P. gingivalis sucD, P. gingivalis | branches | |
| | | 4hbd fimD:: M. bovis | integrated into | |
| | | sucA, C. kluyveri 4hbd | ECKh-422 | |
| 12 | ECKh- | ΔadhE ΔldhA ΔpflB | | C. acetobutylicum buk1, C. acetobutylicum |
| | 432 | ΔlpdA::K.p.lpdA322 Δmdh | | ptb, C. beijerinckii |
| | | ΔarcA gltAR163L fimD:: E. coli | | Ald |
| | | sucCD, P. gingivalis sucD, P. gingivalis | | |
| | | 4hbd fimD:: M. bovis | | |
| | | sucA, C. kluyveri 4hbd | | |
| 13 | ECKh- | ΔadhE ΔldhA ΔpflB | Acetate kinase | P. gingivalis Cat2, C. beijerinckii |
| | 439 | ΔlpdA::K.p.lpdA322 Δmdh | deletion of ECKh- | Ald |
| | | ΔarcA gltAR163L ΔackA fimD:: | 432 | |
| | | E. coli sucCD, P. gingivalis | | |
| | | sucD, P. gingivalis 4hbd fimD:: | | |
| | | M. bovis sucA, C. kluyveri 4hbd | | |
| 14 | ECKh- | ΔadhE ΔldhA ΔpflB | Acetate kinase | P. gingivalis Cat2, C. beijerinckii |
| | 453 | ΔlpdA::K.p.lpdA322 Δmdh | deletion and | Ald |
| | | ΔarcA gltAR163L ΔackA | PPC/PEPCK | |
| | | Δppc::H.i.ppck fimD:: E. coli | replacement of | |
| | | sucCD, P. gingivalis sucD, P. gingivalis | ECKh-432 | |
| | | 4hbd fimD:: M. bovis | | |
| | | sucA, C. kluyveri 4hbd | | |
| 15 | ECKh- | ΔadhE ΔldhA ΔpflB ΔlpdA::fnr- | Replacement of | P. gingivalis Cat2, C. beijerinckii |
| | 456 | pflB6-K.p.lpdA322 Δmdh ΔarcA | lpdA promoter | Ald |
| | | gltAR163L fimD:: E. coli | with anaerobic | |
| | | sucCD, P. gingivalis sucD, P. gingivalis | promoter in | |
| | | 4hbd fimD:: M. bovis | ECKh-432 | |
| | | sucA, C. kluyveri 4hbd | | |
| 16 | ECKh- | ΔadhE ΔldhA ΔpflB ΔlpdA:: | Replacement of | P. gingivalis Cat2, C. beijerinckii |
| | 455 | K.p.lpdA322 ΔpdhR:: fnr-pflB6 | pdhR and aceEF | Ald |
| | | Δmdh ΔarcA gltAR163L fimD:: | promoter with | |
| | | E. coli sucCD, P. gingivalis | anaerobic | |
| | | sucD, P. gingivalis 4hbd fimD:: | promoter in | |
| | | M. bovis sucA, C. kluyveri 4hbd | ECKh-432 | |
| 17 | ECKh- | ΔadhE ΔldhA ΔpflB ΔlpdA:: | Integration of | C. beijerinckii Ald |
| | 459 | K.p.lpdA322 Δmdh ΔarcA | BK/PTB into | |
| | | gltAR163L fimD:: E. coli | ECKh-432 | |
| | | sucCD, P. gingivalis sucD, P. gingivalis | | |
| | | 4hbd fimD:: M. bovis | | |
| | | sucA, C. kluyveri 4hbd fimD:: C. acetobutylicum | | |
| | | buk1, C. acetobutylicum | | |
| | | ptb | | |
| 18 | ECKh- | ΔadhE ΔldhA ΔpflB ΔlpdA:: | | C. beijerinckii Ald, G. thermoglucosidasius |
| | 459 | K.p.lpdA322 Δmdh ΔarcA | | adh1 |
| | | gltAR163L fimD:: E. coli | | |
| | | sucCD, P. gingivalis sucD, P. gingivalis | | |
| | | 4hbd fimD:: M. bovis | | |
| | | sucA, C. kluyveri 4hbd fimD:: C. acetobutylicum | | |
| | | buk1, C. acetobutylicum | | |
| | | ptb | | |
| 19 | ECKh- | ΔadhE ΔldhA ΔpflB | Non-PTS sucrose | P. gingivalis Cat2, C. beijerinckii |
| | 463 | ΔlpdA::K.p.lpdA322 Δmdh | genes inserted into | Ald |
| | | ΔarcA gltAR163L fimD:: E. coli | ECKh-432 | |
| | | sucCD, P. gingivalis sucD, P. gingivalis | | |
| | | 4hbd fimD:: M. bovis | | |
| | | sucA, C. kluyveri 4hbd | | |
| | | rrnC::cscAKB | | |
| 20 | ECKh- | ΔadhE ΔldhA ΔpflB | | C. acetobutylicum buk1, C. acetobutylicum |
| | 463 | ΔlpdA::K.p.lpdA322 Δmdh | | ptb, C. beijerinckii |
| | | ΔarcA gltAR163L fimD:: E. coli | | Ald |
| | | sucCD, P. gingivalis sucD, P. gingivalis | | |
| | | 4hbd fimD:: M. bovis | | |
| | | sucA, C. kluyveri 4hbd | | |
| | | rrnC::cscAKB | | |

[0622] The strains summarized in Table 18 are as follows. Strain 1: Single deletion derivative of E. coli MG1655, with deletion of endogenous ldhA; plasmid expression of E. coli sucCD, P. gingivalis sucD, P. gingivalis 4hbd, P. gingivalis Cat2, C. acetobutylicum AdhE2. Strain 2: Host strain AB3, a succinate producing strain, derivative of E. coli MG1655, with deletions of endogenous adhE ldhA pflB; plasmid expression of E. coli sucCD, P. gingivalis sucD, P. gingivalis 4hbd, P. gingivalis Cat2, C. acetobutylicum AdhE2.

[0623] Strain 3: Host strain ECKh-138, deletion of endogenous adhE, ldhA, pflB, deletion of endogenous lpdA and chromosomal insertion of Klebsiella pneumoniae lpdA with a Glu354Lys mutation at the lpdA locus; plasmid expression of E. coli sucCD, P. gingivalis sucD, P. gingivalis 4hbd, P. gingivalis Cat2, C. acetobutylicum AdhE2; strain provides improvement of lpdA to increase pyruvate dehydrogenase flux. Strain 4: Host strain ECKh-138, deletion of endogenous adhE, ldhA, pflB, and lpdA, chromosomal insertion of Klebsiella pneumoniae lpdA with a Glu354Lys mutation; plasmid expression E. coli sucCD, P. gingivalis sucD, P. gingivalis 4hbd, C. acetobutylicum buk1, C. acetobutylicum ptb, C. acetobutylicum AdhE2.

[0624] Strain 5: Host strain ECKh-401, deletion of endogenous adhE, ldhA, pflB, deletion of endogenous lpdA and chromosomal insertion of Klebsiella pneumoniae lpdA with a Glu354Lys mutation at the lpdA locus, deletion of endogenous mdh and arcA; plasmid expression of E. coli sucCD, P. gingivalis sucD, P. gingivalis 4hbd, P. gingivalis Cat2, C. acetobutylicum AdhE2; strain has deletions in mdh and arcA to direct flux through oxidative TCA cycle. Strain 6: host strain ECKh-401, deletion of endogenous adhE, ldhA, pflB, deletion of endogenous lpdA and chromosomal insertion of Klebsiella pneumoniae lpdA with a Glu354Lys mutation at the lpdA locus, deletion of endogenous mdh and arcA; plasmid expression of M. bovis sucA, E. coli sucCD, P. gingivalis sucD, P. gingivalis 4hbd, P. gingivalis Cat2, C. acetobutylicum AdhE2.

[0625] Strain 7: Host strain ECKh-422, deletion of endogenous adhE, ldhA, pflB, deletion of endogenous lpdA and chromosomal insertion of Klebsiella pneumoniae lpdA with a Glu354Lys mutation at the lpdA locus, deletion of endogenous mdh and arcA, chromosomal replacement of gltA with gltA Arg163Leu mutant; plasmid expression of E. coli sucCD, P. gingivalis sucD, P. gingivalis 4hbd, P. gingivalis Cat2, C. acetobutylicum AdhE2; strain has mutation in citrate synthase to improve anaerobic activity. Strain 8: strain ECKh-422, deletion of endogenous adhE, ldhA, pflB, deletion of endogenous lpdA and chromosomal insertion of Klebsiella pneumoniae lpdA with a Glu354Lys mutation at the lpdA locus, deletion of endogenous mdh and arcA, chromosomal replacement of gltA with gltA Arg163Leu mutant; plasmid expression of M. bovis sucA, E. coli sucCD, P. gingivalis sucD, P. gingivalis 4hbd, P. gingivalis Cat2, C. acetobutylicum AdhE2. Strain 9: host strain ECKh-422, deletion of endogenous adhE, ldhA, pflB, deletion of endogenous lpdA and chromosomal insertion of Klebsiella pneumoniae lpdA with a Glu354Lys mutation at the lpdA locus, deletion of endogenous mdh and arcA, chromosomal replacement of gltA with gltA Arg163Leu mutant; plasmid expression of M. bovis sucA, E. coli sucCD, P. gingivalis sucD, P. gingivalis 4hbd, P. gingivalis Cat2, C. beijerinckii Ald.

[0626] Strain 10: host strain ECKh-426, deletion of endogenous adhE, ldhA, pflB, deletion of endogenous lpdA and chromosomal insertion of Klebsiella pneumoniae lpdA with a Glu354Lys mutation at the lpdA locus, deletion of endogenous mdh and arcA, chromosomal replacement of gltA with gltA Arg163Leu mutant, chromosomal insertion at the fimD locus of E. coli sucCD, P. gingivalis sucD, P. gingivalis 4hbd; plasmid expression of P. gingivalis Cat2, C. beijerinckii Ald; strain has succinate branch of upstream pathway integrated into strain ECKh-422 at the fimD locus. Strain 11: host strain ECKh-432, deletion of endogenous adhE, ldhA, pflB, deletion of endogenous lpdA and chromosomal insertion of Klebsiella pneumoniae lpdA with a Glu354Lys mutation at the lpdA locus, deletion of endogenous mdh and arcA, chromosomal replacement of gltA with gltA Arg163Leu mutant, chromosomal insertion at the fimD locus of E. coli sucCD, P. gingivalis sucD, P. gingivalis 4hbd, chromosomal insertion at the fimD locus of M. bovis sucA, C. kluyveri 4 hbd; plasmid expression of P. gingivalis Cat2, C. beijerinckii Ald; strain has succinate and alpha-ketoglutarate upstream pathway branches integrated into ECKh-422. Strain 12: host strain ECKh-432, deletion of endogenous adhE, ldhA, pflB, deletion of endogenous lpdA and chromosomal insertion of Klebsiella pneumoniae lpdA with a Glu354Lys mutation at the lpdA locus, deletion of endogenous mdh and arcA, chromosomal replacement of gltA with gltA Arg163Leu mutant, chromosomal insertion at the fimD locus of E. coli sucCD, P. gingivalis sucD, P. gingivalis 4hbd, chromosomal insertion at the fimD locus of M. bovis sucA, C. kluyveri 4 hbd; plasmid expression of C. acetobutylicum buk1, C. acetobutylicum ptb, C. beijerinckii Ald.

[0627] Strain 13: host strain ECKh-439, deletion of endogenous adhE, ldhA, pflB, deletion of endogenous lpdA and chromosomal insertion of Klebsiella pneumoniae lpdA with a Glu354Lys mutation at the lpdA locus, deletion of endogenous mdh and arcA, chromosomal replacement of gltA with gltA Arg163Leu mutant, deletion of endogenous ackA, chromosomal insertion at the fimD locus of E. coli sucCD, P. gingivalis sucD, P. gingivalis 4hbd, chromosomal insertion at the fimD locus of M. bovis sucA, C. kluyveri 4 hbd; plasmid expression of P. gingivalis Cat2, C. beijerinckii Ald; strain has acetate kinase deletion in strain ECKh-432. Strain 14: host strain ECKh-453, deletion of endogenous adhE, ldhA, pflB, deletion of endogenous lpdA and chromosomal insertion of Klebsiella pneumoniae lpdA with a Glu354Lys mutation at the lpdA locus, deletion of endogenous mdh and arcA, chromosomal replacement of gltA with gltA Arg163Leu mutant, deletion of endogenous ackA, deletion of endogenous ppc and insertion of Haemophilus influenza ppck at the ppc locus, chromosomal insertion at the fimD locus of E. coli sucCD, P. gingivalis sucD, P. gingivalis 4hbd, chromosomal insertion at the fimD locus of M. bovis sucA, C. kluyveri 4 hbd; plasmid expression of P. gingivalis Cat2, C. beijerinckii Ald; strain has acetate kinase deletion and PPC/PEPCK replacement in strain ECKh-432.

[0628] Strain 15: host strain ECKh-456, deletion of endogenous adhE, ldhA, pflB, deletion of endogenous lpdA and chromosomal insertion of Klebsiella pneumoniae lpdA with a Glu354Lys mutation at the lpdA locus, deletion of endogenous mdh and arcA, chromosomal replacement of gltA with gltA Arg163Leu mutant, chromosomal insertion at the fimD locus of E. coli sucCD, P. gingivalis sucD, P. gingivalis 4hbd, chromosomal insertion at the fimD locus of M. bovis sucA, C. kluyveri 4 hbd, replacement of lpdA promoter with fnr binding site, pflB p6 promoter and RBS of pflB; plasmid expression of P. gingivalis Cat2, C. beijerinckii Ald; strain has replacement of lpdA promoter with anaerobic promoter in strain ECKh-432. Strain 16: host strain ECKh-455, deletion of endogenous adhE, ldhA, pflB, deletion of endogenous lpdA and chromosomal insertion of Klebsiella pneumoniae lpdA with a Glu354Lys mutation at the lpdA locus, deletion of endogenous mdh and arcA, chromosomal replacement of gltA with gltA Arg163Leu mutant, chromosomal insertion at the fimD locus of E. coli sucCD, P. gingivalis sucD, P. gingivalis 4hbd, chromosomal insertion at the fimD locus of M. bovis sucA, C. kluyveri 4 hbdI, replacement of pdhR and aceEF promoter with fnr binding site, pflB-p6 promoter and RBS of pflB; plasmid expression of P. gingivalis Cat2, C. beijerinckii Ald; strain has replacement of pdhR and aceEF promoter with anaerobic promoter in ECKh-432.

[0629] Strain 17: host strain ECKh-459, deletion of endogenous adhE, ldhA, pflB, deletion of endogenous lpdA and chromosomal insertion of Klebsiella pneumoniae lpdA with a Glu354Lys mutation at the lpdA locus, deletion of endogenous mdh and arcA, chromosomal replacement of gltA with gltA Arg163Leu mutant, chromosomal insertion at the fimD locus of E. coli sucCD, P. gingivalis sucD, P. gingivalis 4hbd, chromosomal insertion at the fimD locus of M. bovis sucA, C. kluyveri 4hbd, chromosomal insertion at the fimD locus of C. acetobutylicum buk1, C. acetobutylicum ptb; plasmid expression of C. beijerinckii Ald; strain has integration of BK/PTB into strain ECKh-432. Strain 18: host strain ECKh-459, deletion of endogenous adhE, ldhA, pflB, deletion of endogenous lpdA and chromosomal insertion of Klebsiella pneumoniae lpdA with a Glu354Lys mutation at the lpdA locus, deletion of endogenous mdh and arcA, chromosomal replacement of gltA with gltA Arg163Leu mutant, chromosomal insertion at the fimD locus of E. coli sucCD, P. gingivalis sucD, P. gingivalis 4hbd, chromosomal insertion at the fimD locus of M. bovis sucA, C. kluyveri 4 hbd, chromosomal insertion at the fimD locus of C. acetobutylicum buk1, C. acetobutylicum ptb; plasmid expression of C. beijerinckii Ald, G. thermoglucosidasius adh1.

[0630] Strain 19: host strain ECKh-463, deletion of endogenous adhE, ldhA, pflB, deletion of endogenous lpdA and chromosomal insertion of Klebsiella pneumoniae lpdA with a Glu354Lys mutation at the lpdA locus, deletion of endogenous mdh and arcA, chromosomal replacement of gltA with gltA Arg163Leu mutant, chromosomal insertion at the fimD locus of E. coli sucCD, P. gingivalis sucD, P. gingivalis 4hbd, chromosomal insertion at the fimD locus of M. bovis sucA, C. kluyveri 4 hbd, insertion at the rrnC locus of non-PTS sucrose operon genes sucrose permease (cscB), D-fructokinase (cscK), sucrose hydrolase (cscA), and a Lad-related sucrose-specific repressor (cscR); plasmid expression of P. gingivalis Cat2, C. beijerinckii Ald; strain has non-PTS sucrose genes inserted into strain ECKh-432. Strain 20: host strain ECKh-463 deletion of endogenous adhE, ldhA, pflB, deletion of endogenous lpdA and chromosomal insertion of Klebsiella pneumoniae lpdA with a Glu354Lys mutation at the lpdA locus, deletion of endogenous mdh and arcA, chromosomal replacement of gltA with gltA Arg163Leu mutant, chromosomal insertion at the fimD locus of E. coli sucCD, P. gingivalis sucD, P. gingivalis 4hbd, chromosomal insertion at the fimD locus of M. bovis sucA, C. kluyveri 4hbd, insertion at the rrnC locus of non-PTS sucrose operon; plasmid expression of C. acetobutylicum buk1, C. acetobutylicum ptb, C. beijerinckii Ald.

[0631] In addition to the BDO producing strains disclosed herein, including those disclosed in Table 18, it is understood that additional modifications can be incorporated that further increase production of BDO and/or decrease undesirable byproducts. For example, a BDO producing strain, or a strain of Table 18, can incorporate additional knockouts to further increase the production of BDO or decrease an undesirable byproduct. Exemplary knockouts have been described previously (see U.S. publication 2009/0047719). Such knockout strains include, but are not limited to, one ore more genes selected from ADHEr, NADH6; ADHEr, PPCK; ADHEr, SUCD4; ADHEr, ATPS4r; ADHEr, FUM; ADHEr, MDH; ADHEr, PFLi, PPCK; ADHEr, PFLi, SUCD4; ADHEr, ACKr, NADH6; ADHEr, NADH6, PFLi; ADHEr, ASPT, MDH; ADHEr, NADH6, PPCK; ADHEr, PPCK, THD2; ADHEr, ATPS4r, PPCK; ADHEr, MDH, THD2; ADHEr, FUM, PFLi; ADHEr, PPCK, SUCD4; ADHEr, GLCpts, PPCK; ADHEr, GLUDy, MDH; ADHEr, GLUDy, PPCK; ADHEr, FUM, PPCK; ADHEr, MDH, PPCK; ADHEr, FUM, GLUDy; ADHEr, FUM, HEX1; ADHEr, HEX1, PFLi; ADHEr, HEX1, THD2; ADHEr, FRD2, LDH_D, MDH; ADHEr, FRD2, LDH_D, ME2; ADHEr, MDH, PGL, THD2; ADHEr, G6PDHy, MDH, THD2; ADHEr, PFLi, PPCK, THD2; ADHEr, ACKr, AKGD, ATPS4r; ADHEr, GLCpts, PFLi, PPCK; ADHEr, ACKr, ATPS4r, SUCOAS; ADHEr, GLUDy, PFLi, PPCK; ADHEr, ME2, PFLi, SUCD4; ADHEr, GLUDy, PFLi, SUCD4; ADHEr, ATPS4r, LDH_D, SUCD4; ADHEr, FUM, HEX1, PFLi; ADHEr, MDH, NADH6, THD2; ADHEr, ATPS4r, MDH, NADH6; ADHEr, ATPS4r, FUM, NADH6; ADHEr, ASPT, MDH, NADH6; ADHEr, ASPT, MDH, THD2; ADHEr, ATPS4r, GLCpts, SUCD4; ADHEr, ATPS4r, GLUDy, MDH; ADHEr, ATPS4r, MDH, PPCK; ADHEr, ATPS4r, FUM, PPCK; ADHEr, ASPT, GLCpts, MDH; ADHEr, ASPT, GLUDy, MDH; ADHEr, ME2, SUCD4, THD2; ADHEr, FUM, PPCK, THD2; ADHEr, MDH, PPCK, THD2; ADHEr, GLUDy, MDH, THD2; ADHEr, HEX1, PFLi, THD2; ADHEr, ATPS4r, G6PDHy, MDH; ADHEr, ATPS4r, MDH, PGL; ADHEr, ACKr, FRD2, LDH_D; ADHEr, ACKr, LDH_D, SUCD4; ADHEr, ATPS4r, FUM, GLUDy; ADHEr, ATPS4r, FUM, HEX1; ADHEr, ATPS4r, MDH, THD2; ADHEr, ATPS4r, FRD2, LDH_D; ADHEr, ATPS4r, MDH, PGDH; ADHEr, GLCpts, PPCK, THD2; ADHEr, GLUDy, PPCK, THD2; ADHEr, FUM, HEX1, THD2; ADHEr, ATPS4r, ME2, THD2; ADHEr, FUM, ME2, THD2; ADHEr, GLCpts, GLUDy, PPCK; ADHEr, ME2, PGL, THD2; ADHEr, G6PDHy, ME2, THD2; ADHEr, ATPS4r, FRD2, LDH_D, ME2; ADHEr, ATPS4r, FRD2, LDH_D, MDH; ADHEr, ASPT, LDH_D, MDH, PFLi; ADHEr, ATPS4r, GLCpts, NADH6, PFLi; ADHEr, ATPS4r, MDH, NADH6, PGL; ADHEr, ATPS4r, G6PDHy, MDH, NADH6; ADHEr, ACKr, FUM, GLUDy, LDH_D; ADHEr, ACKr, GLUDy, LDH_D, SUCD4; ADHEr, ATPS4r, G6PDHy, MDH, THD2; ADHEr, ATPS4r, MDH, PGL, THD2; ADHEr, ASPT, G6PDHy, MDH, PYK; ADHEr, ASPT, MDH, PGL, PYK; ADHEr, ASPT, LDH_D, MDH, SUCOAS; ADHEr, ASPT, FUM, LDH_D, MDH; ADHEr, ASPT, LDH_D, MALS, MDH; ADHEr, ASPT, ICL, LDH_D, MDH; ADHEr, FRD2, GLUDy, LDH_D, PPCK; ADHEr, FRD2, LDH_D, PPCK, THD2; ADHEr, ACKr, ATPS4r, LDH_D, SUCD4; ADHEr, ACKr, ACS, PPC, PPCK; ADHEr, GLUDy, LDH_D, PPC, PPCK; ADHEr, LDH_D, PPC, PPCK, THD2; ADHEr, ASPT, ATPS4r, GLCpts, MDH; ADHEr, G6PDHy, MDH, NADH6, THD2; ADHEr, MDH, NADH6, PGL, THD2; ADHEr, ATPS4r, G6PDHy, GLCpts, MDH; ADHEr, ATPS4r, GLCpts, MDH, PGL; ADHEr, ACKr, LDH_D, MDH, SUCD4.

[0632] Table 19 shows the reactions of corresponding genes to be knocked out of a host organism such as E. coli. The corresponding metabolite corresponding to abbreviations in Table 19 are shown in Table 20

TABLE 19
Corresponding genes to be knocked out to prevent a particular reaction from occurring
in E. coli.

| Reaction | | Genes Encoding the Enzyme(s) |
|---|---|---|
| Abbreviation | Reaction Stoichiometry* | Catalyzing Each Reaction& |
| ACKr | [c]: ac + atp <==> actp + adp | (b3115 or b2296 or |
| | | b1849) |
| ACS | [c]: ac + atp + coa --> accoa + amp + ppi | b4069 |
| ACt6 | ac[p] + h[p] <==> ac[c] + h[c] | Non-gene associated |
| ADHEr | [c]: etoh + nad <==> acald + h + nadh | (b0356 or b1478 or |
| | | b1241) |
| | [c]: acald + coa + nad <==> accoa + h + nadh | (b1241 or b0351) |
| AKGD | [c]: akg + coa + nad --> co2 + nadh + succoa | (b0116 and b0726 and |
| | | b0727) |
| ASNS2 | [c]: asp-L + atp + nh4 --> amp + asn-L + h + ppi | b3744 |
| ASPT | [c]: asp-L --> fum + nh4 | b4139 |
| ATPS4r | adp[c] + (4) h[p] + pi[c] <==> atp[c] + (3) h[c] + h2o[c] | (((b3736 and b3737 and |
| | | b3738) and (b3731 and b3732 |
| | | and b3733 and b3734 and |
| | | b3735)) or ((b3736 and |
| | | b3737 and b3738) and (b3731 |
| | | and b3732 and b3733 and |
| | | b3734 and b3735) and b3739)) |
| CBMK2 | [c]: atp + co2 + nh4 <==> adp + cbp + (2) h | (b0521 or b0323 or |
| | | b2874) |
| EDA | [c]: 2ddg6p --> g3p + pyr | b1850 |
| ENO | [c]: 2pg <==> h2o + pep | b2779 |
| FBA | [c]: fdp <==> dhap + g3p | (b2097 or b2925 or |
| | | b1773) |
| FBP | [c]: fdp + h2o --> f6p + pi | (b4232 or b3925) |
| FDH2 | for[p] + (2) h[c] + q8[c] --> co2[c] + h[p] + q8h2[c] | ((b3892 and b3893 and b3894) |
| | for[p] + (2) h[c] + mqn8[c] --> co2[c] + h[p] + mql8[c] | or (b1474 and b1475 and |
| | | b1476)) |
| FRD2 | [c]: fum + mql8 --> mqn8 + succ | (b4151 and b4152 and b4153 |
| | [c]: 2dmmql8 + fum --> 2dmmq8 + succ | and b4154) |
| FTHFD | [c]: 10fthf + h2o --> for + h + thf | b1232 |
| FUM | [c]: fum + h2o <==> mal-L | (b1612 or b4122 or |
| | | b1611) |
| G5SD | [c]: glu5p + h + nadph --> glu5sa + nadp + pi | b0243 |
| G6PDHy | [c]: g6p + nadp <==> 6pgl + h + nadph | b1852 |
| GLCpts | glc-D[p] + pep[c] --> g6p[c] + pyr[c] | ((b2417 and b1101 and b2415 |
| | | and b2416) or (b1817 and |
| | | b1818 and b1819 and b2415 |
| | | and b2416) or (b2417 and |
| | | b1621 and b2415 and b2416)) |
| GLU5K | [c]: atp + glu-L --> adp + glu5p | b0242 |
| GLUDy | [c]: glu-L + h2o + nadp <==> akg + h + nadph + nh4 | b1761 |
| GLYCL | [c]: gly + nad + thf --> co2 + mlthf + nadh + nh4 | (b2904 and b2903 and b2905 |
| | | and b0116) |
| HEX1 | [c]: atp + glc-D --> adp + g6p + h | b2388 |
| ICL | [c]: icit --> glx + succ | b4015 |
| LDH_D | [c]: lac-D + nad <==> h + nadh + pyr | (b2133 or b1380) |
| MALS | [c]: accoa + glx + h2o --> coa + h + mal-L | (b4014 or b2976) |
| MDH | [c]: mal-L + nad <==> h + nadh + oaa | b3236 |
| ME2 | [c]: mal-L + nadp --> co2 + nadph + pyr | b2463 |
| MTHFC | [c]: h2o + methf <==> 10fthf + h | b0529 |
| NADH12 | [c]: h + mqn8 + nadh --> mql8 + nad | b1109 |
| | [c]: h + nadh + q8 --> nad + q8h2 | |
| | [c]: 2dmmq8 + h + nadh --> 2dmmql8 + nad | |
| NADH6 | (4) h[c] + nadh[c] + q8[c] --> (3) h[p] + nad[c] + | (b2276 and b2277 and b2278 |
| | q8h2[c] | and b2279 and b2280 and |
| | (4) h[c] + mqn8[c] + nadh[c] --> (3) h[p] + mql8[c] + | b2281 and b2282 and b2283 |
| | nad[c] | and b2284 and b2285 and |
| | 2dmmq8[c] + (4) h[c] + nadh[c] --> 2dmmql8[c] + (3) | b2286 and b2287 and b2288) |
| | h[p] + nad[c] | |
| PFK | [c]: atp + f6p --> adp + fdp + h | (b3916 or b1723) |
| PFLi | [c]: coa + pyr --> accoa + for | (((b0902 and b0903) and |
| | | b2579) or (b0902 and b0903) |
| | | or (b0902 and b3114) or |
| | | (b3951 and b3952)) |
| PGDH | [c]: 6pgc + nadp --> co2 + nadph + ru5p-D | b2029 |
| PGI | [c]: g6p <==> f6p | b4025 |
| PGL | [c]: 6pgl + h2o --> 6pgc + h | b0767 |
| PGM | [c]: 2pg <==> 3pg | (b3612 or b4395 or b0755) |
| PPC | [c]: co2 + h2o + pep --> h + oaa + pi | b3956 |
| PPCK | [c]: atp + oaa --> adp + co2 + pep | b3403 |
| PRO1z | [c]: fad + pro-L --> 1pyr5c + fadh2 + h | b1014 |
| PYK | [c]: adp + h + pep --> atp + pyr | b1854 or b1676) |
| PYRt2 | h[p] + pyr[p] <==> h[c] + pyr[c] | Non-gene associated |
| RPE | [c]: ru5p-D <==> xu5p-D | (b4301 or b3386) |
| SO4t2 | so4[e] <==> so4[p] | (b0241 or b0929 or b1377 or |
| | | b2215) |
| SUCD4 | [c]: q8 + succ --> fum + q8h2 | (b0721 and b0722 and b0723 |
| | | and b0724) |
| SUCOAS | [c]: atp + coa + succ <==> adp + pi + succoa | (b0728 and b0729) |
| SULabc | atp[c] + h2o[c] + so4[p] --> adp[c] + h[c] + pi[c] + | ((b2422 and b2425 and b2424 |
| | so4[c] | and b2423) or (b0763 and |
| | | b0764 and b0765) or (b2422 |
| | | and b2424 and b2423 and |
| | | b3917)) |
| TAL | [c]: g3p + s7p <==> e4p + f6p | (b2464 or b0008) |
| THD2 | (2) h[p] + nadh[c] + nadp[c] --> (2) h[c] + nad[c] + | (b1602 and b1603) |
| | nadph[c] | |
| THD5 | [c]: nad + nadph --> nadh + nadp | (b3962 or (b1602 and |
| | | b1603)) |
| TPI | [c]: dhap <==> g3p | b3919 |

TABLE 20
Metabolite names corresponding to abbreviations used in Table 19.

| Metabolite | |
|---|---|
| Abbreviation | Metabolite Name |
| 10fthf | 10-Formyltetrahydrofolate |
| 1pyr5c | 1-Pyrroline-5-carboxylate |
| 2ddg6p | 2-Dehydro-3-deoxy-D-gluconate 6-phosphate |
| 2dmmq8 | 2-Demethylmenaquinone 8 |
| 2dmmql8 | 2-Demethylmenaquinol 8 |
| 2pg | D-Glycerate 2-phosphate |
| 3pg | 3-Phospho-D-glycerate |
| 6pgc | 6-Phospho-D-gluconate |
| 6pgl | 6-phospho-D-glucono-1,5-lactone |
| ac | Acetate |
| acald | Acetaldehyde |
| accoa | Acetyl-CoA |
| actp | Acetyl phosphate |
| adp | ADP |
| akg | 2-Oxoglutarate |
| amp | AMP |
| asn-L | L-Asparagine |
| asp-L | L-Aspartate |
| atp | ATP |
| cbp | Carbamoyl phosphate |
| co2 | CO2 |
| coa | Coenzyme A |
| dhap | Dihydroxyacetone phosphate |
| e4p | D-Erythrose 4-phosphate |
| etoh | Ethanol |
| f6p | D-Fructose 6-phosphate |
| fad | Flavin adenine dinucleotide oxidized |
| fadh2 | Flavin adenine dinucleotide reduced |
| fdp | D-Fructose 1,6-bisphosphate |
| for | Formate |
| fum | Fumarate |
| g3p | Glyceraldehyde 3-phosphate |
| g6p | D-Glucose 6-phosphate |
| glc-D | D-Glucose |
| glu5p | L-Glutamate 5-phosphate |
| glu5sa | L-Glutamate 5-semialdehyde |
| glu-L | L-Glutamate |
| glx | Glyoxylate |
| gly | Glycine |
| h | H+ |
| h2o | H2O |
| icit | Isocitrate |
| lac-D | D-Lactate |
| mal-L | L-Malate |
| methf | 5,10-Methenyltetrahydrofolate |
| mlthf | 5,10-Methylenetetrahydrofolate |
| mql8 | Menaquinol 8 |
| mqn8 | Menaquinone 8 |
| nad | Nicotinamide adenine dinucleotide |
| nadh | Nicotinamide adenine dinucleotide - reduced |
| nadp | Nicotinamide adenine dinucleotide phosphate |
| nadph | Nicotinamide adenine dinucleotide phosphate - reduced |
| nh4 | Ammonium |
| oaa | Oxaloacetate |
| pep | Phosphoenolpyruvate |
| pi | Phosphate |
| ppi | Diphosphate |
| pro-L | L-Proline |
| pyr | Pyruvate |
| q8 | Ubiquinone-8 |
| q8h2 | Ubiquinol-8 |
| ru5p-D | D-Ribulose 5-phosphate |
| s7p | Sedoheptulose 7-phosphate |
| so4 | Sulfate |
| succ | Succinate |
| succoa | Succinyl-CoA |
| thf | 5,6,7,8-Tetrahydrofolate |
| xu5p-D | D-Xylulose 5-phosphate |

### Example XX

### Exemplary Pathways for Producing BDO

[0633] This example describes exemplary pathways to produce 4-hydroxybutanal (4-HBal) and/or BDO using a carboxylic acid reductase as a BDO pathway enzyme. See corresponding example in WO2013/186402. 4-Hydroxybutyrate can be derived from the tricarboxylic acid cycle intermediates succinyl-CoA and/or alpha-ketoglutarate as shown in FIG. 58.

### Example XXI

### Biosynthesis of 1,4-Butanediol Using A Carboxylic Acid Reductase Enzyme

[0634] This example describes the generation of a microbial organism that produces 1,4-butanediol using a carboxylic acid reductase enzyme. See corresponding example in WO2013/186402. The car gene (GNM_{—}720) was cloned by PCR from Nocardia genomic DNA. Its nucleic acid and protein sequences are shown in FIGS. 59A and 59B, respectively. A codon-optimized version of the npt gene (GNM_{—}721) was synthesized. Its nucleic acid and protein sequences are shown in FIGS. 60A and 60B, respectively. The resulting vector from cloning GNM_{—}720 and GNM_{—}721 into pZS*13 is shown in FIG. 61. Additional pathways to BDO employing carboxylic acid reductase (CAR) are disclosed in FIG. 62.

### Example XXII

### Pathways to Putrescine that Employ Carboxylic Acid Reductase

[0635] This example describes exemplary putrescine pathways utilizing carboxylic acid reductase. See corresponding example in WO2013/186402. FIG. 63 describes a number of additional biosynthetic pathways leading to the production of putrescine from succinate, succinyl-CoA, or alpha-ketoglutarate and employing a carboxylic acid reductase.

### Example XXIII

### Exemplary Enzymes for Production of C4 Compounds

[0636] This example describes exemplary enzymes for production of C4 compounds such as 1,4-butanediol, 4-hydroxybutanal and putrescine. See corresponding example in WO2013/186402.

[0637] Enzyme Classes.

[0638] All transformations depicted in FIGS. 58, 62 and 63 fall into the general categories of transformations shown in Table 21. This example describes a number of biochemically characterized genes in each category. Specifically listed are genes that can be applied to catalyze the appropriate transformations in FIGS. 58, 62 and 63 when cloned and expressed. The first three digits of each label correspond to the first three Enzyme Commission number digits which denote the general type of transformation independent of substrate specificity

TABLE 21
Classes of Enzyme Transformations Depicted in FIGS. 58, 62 and 63.

| LABEL | FUNCTION |
|---|---|
| 1.1.1.a | Oxidoreductase (oxo to alcohol) |
| 1.1.1.c | Oxidoreductase (2 step, acyl-CoA to alcohol) |
| 1.2.1.b | Oxidoreductase (acyl-CoA to aldehyde) |
| 1.2.1.c | Oxidoreductase (2-oxo acid to acyl-CoA, |
| | decarboxylation) |
| 1.2.1.d | Oxidoreductase (phosphonate reductase) |
| 1.2.1.e | Acid reductase |
| 1.4.1.a | Oxidoreductase (aminating) |
| 2.3.1.a | Acyltransferase (transferring phosphate group to CoA) |
| 2.6.1.a | Aminotransferase |
| 2.7.2.a | Phosphotransferase (carboxy acceptor) |
| 2.8.3.a | CoA transferase |
| 3.1.2.a | CoA hydrolase |
| 4.1.1.a | Carboxy-lyase |
| 6.2.1.a | CoA synthetase |

### 1.1.1.a Oxidoreductase (Oxo to Alcohol)

[0639] Aldehyde to Alcohol.

[0640] Three transformations described in FIGS. 58, 62 and 63 involve the conversion of an aldehyde to alcohol. These are 4-hydroxybutyrate dehydrogenase (step C, FIGS. 58 and 62), 1,4-butanediol dehydrogenase (step E, FIGS. 58 and 62), and 5-hydroxy-2-pentanoic acid (step Y, FIG. 62). Exemplary genes encoding enzymes that catalyze the conversion of an aldehyde to alcohol, that is, alcohol dehydrogenase or equivalently aldehyde reductase, include those recited above in EXAMPLE IV Exemplary BDO Pathways.

[0641] Enzymes exhibiting 4-hydroxybutyrate dehydrogenase activity (EC 1.1.1.61) also fall into this category. The description and enzymes for this example can be found in the above EXAMPLE IV Exemplary BDO Pathways.

[0642] The adh1 gene from Geobacillus thermoglucosidasius M10EXG (Jeon et al., J. Biotechnol. 135:127-133 (2008)) was shown to exhibit high activity on both 4-hydroxybutanal and butanal (see above). Thus this enzyme exhibits 1,4-butanediol dehydrogenase activity

| Gene | Accession No. | GI No. | Organism |
|---|---|---|---|
| adh1 | AAR91477.1 | 40795502 | Geobacillus thermoglucosidasius |
| | | | M10EXG |

[0643] Another exemplary enzyme is 3-hydroxyisobutyrate dehydrogenase, which catalyzes the reversible oxidation of 3-hydroxyisobutyrate to methylmalonate semialdehyde. The description and enzymes for this example can be found in the above EXAMPLE IV Exemplary BDO Pathways. Several 3-hydroxyisobutyrate dehydrogenase enzymes have also been shown to convert malonic semialdehyde to 3-hydroxyproprionic acid (3-HP). The description and enzymes for this example can be found in the above EXAMPLE IV Exemplary BDO Pathways.

[0644] The conversion of malonic semialdehyde to 3-HP can also be accomplished by two other enzymes, NADH-dependent 3-hydroxypropionate dehydrogenase and NADPH-dependent malonate semialdehyde reductase. The description and enzymes for this example can be found in the above EXAMPLE IV Exemplary BDO Pathways.

### 1.1.1.c Oxidoreductase (2 Step, Acyl-CoA to Alcohol).

[0645] Steps S and W of FIG. 62 depict bifunctional reductase enzymes that can form 4-hydroxybutyrate and 1,4-butanediol, respectively. Exemplary 2-step oxidoreductases that convert an acyl-CoA to alcohol include those that transform substrates such as acetyl-CoA to ethanol (for example, adhE from E. coli (Kessler et al., FEBS. Lett. 281:59-63 (1991)) and butyryl-CoA to butanol (for example, adhE2 from C. acetobutylicum (Fontaine et al., J. Bacteriol. 184:821-830 (2002)). The C. acetobutylicum adhE2 gene was shown to convert 4-hydroxybutyryl-CoA to 1,4-butanediol (see above). In addition to reducing acetyl-CoA to ethanol, the enzyme encoded by adhE in Leuconostoc mesenteroides has been shown to oxidize the branched chain compound isobutyraldehyde to isobutyryl-CoA (Kazahaya et al. J., Gen. Appl. Microbiol. 18:43-55 (1972); Koo et al., Biotechnol. Lett. 27:505-510 (2005)).

| Gene | Accession No. | GI No. | Organism |
|---|---|---|---|
| adhE | NP_415757.1 | 16129202 | Escherichia coli |
| adhE2 | AAK09379.1 | 12958626 | Clostridium acetobutylicum |
| adhE | AAV66076.1 | 55818563 | Leuconostoc mesenteroides |

[0646] Another exemplary enzyme can convert malonyl-CoA to 3-HP. The description and enzymes for this example can be found in the above EXAMPLE IV Exemplary BDO Pathways.

[0647] Longer chain acyl-CoA molecules can be reduced by enzymes such as the jojoba (Simmondsia chinensis) FAR, which encodes an alcohol-forming fatty acyl-CoA reductase. Its overexpression in E. coli resulted in FAR activity and the accumulation of fatty alcohol (Metz et al., Plant Physiol. 122:635-644 2000)).

| Gene | Accession No. | GI No. | Organism |
|---|---|---|---|
| FAR | AAD38039.1 | 5020215 | Simmondsia chinensis |

### 1.2.1.b Oxidoreductase (Acyl-CoA to Aldehyde).

[0648] Step A of FIGS. 58, 62 and 63 involves the conversion of succinyl-CoA to succinate semialdehyde by an aldehyde forming succinyl-CoA reductase. Step Q of FIG. 62 depicts the conversion of 4-hydroxybutyryl-CoA to 4-hydroxybutanal by an aldehyde-forming 4-hydroxybutyryl-CoA reductase. A description and enzymes of this class can be found in above Example IV Exemplary BDO Pathways. In addition to reducing acetyl-CoA to ethanol, the enzyme encoded by adhE in Leuconostoc mesenteroides has been shown to oxidize the branched chain compound isobutyraldehyde to isobutyryl-CoA (Koo et al., Biotechnol. Lett. 27:505-510 (2005)). Butyraldehyde dehydrogenase catalyzes a similar reaction, conversion of butyryl-CoA to butyraldehyde, in solventogenic organisms such as Clostridium saccharoperbutylacetonicum (Kosaka et al., Biosci. Biotechnol. Biochem. 71:58-68 (2007)).

| Gene | Accession No. | GI No. | Organism |
|---|---|---|---|
| acr1 | YP_047869.1 | 50086359 | Acinetobacter calcoaceticus |
| acr1 | AAC45217 | 1684886 | Acinetobacter baylyi |
| acr1 | BAB85476.1 | 18857901 | Acinetobacter sp. Strain M-1 |
| sucD | P38947.1 | 730847 | Clostridium kluyveri |
| sucD | NP_904963.1 | 34540484 | Porphyromonas gingivalis |
| bphG | BAA03892.1 | 425213 | Pseudomonas sp |
| adhE | AAV66076.1 | 55818563 | Leuconostoc mesenteroides |
| bld | AAP42563.1 | 31075383 | Clostridium |
| | | | saccharoperbutylacetonicum |

[0649] An additional enzyme type that converts an acyl-CoA to its corresponding aldehyde is malonyl-CoA reductase, which transforms malonyl-CoA to malonic semialdehyde. A description and enzymes of this class can be found in above Example IV Exemplary BDO Pathways. Yet another candidate for CoA-acylating aldehyde dehydrogenase is the ald gene from Clostridium beijerinckii (Toth et al., Appl. Environ. Microbiol 65:4973-4980 (1999)). This enzyme has been reported to reduce acetyl-CoA and butyryl-CoA to their corresponding aldehydes. This gene is very similar to eutE that encodes acetaldehyde dehydrogenase of Salmonella typhimurium and E. coli (Toth et al., Appl. Environ. Microbiol. 65:4973-4980 (1999)).

| Gene | Accession No. | GI No. | Organism |
|---|---|---|---|
| Msed_0709 | YP_001190808.1 | 146303492 | Metallosphaera sedula |
| mcr | NP_378167.1 | 15922498 | Sulfolobus tokodaii |
| asd-2 | NP_343563.1 | 15898958 | Sulfolobus solfataricus |
| Saci_2370 | YP_256941.1 | 70608071 | Sulfolobus |
| | | | acidocaldarius |
| Ald | AAT66436 | 49473535 | Clostridium beijerinckii |
| eutE | AAA80209 | 687645 | Salmonella typhimurium |
| eutE | P77445 | 2498347 | Escherichia coli |

### 1.2.1.c Oxidoreductase (2-Oxo Acid to Acyl-CoA, Decarboxylation).

[0650] Step AA in FIG. 62 depicts the conversion of 5-hydroxy-2-oxopentanoic acid to 4-hydroxybutyryl-CoA. Candidate enzymes for this transformation include 1) branched-chain 2-keto-acid dehydrogenase, 2) alpha-ketoglutarate dehydrogenase, and 3) the pyruvate dehydrogenase multienzyme complex (PDHC). A description and enzymes of this class can be found in above Example IV Exemplary BDO Pathways.

[0651] Alpha-ketoglutarate dehydrogenase (AKGD) converts alpha-ketoglutarate to succinyl-CoA and is the primary site of control of metabolic flux through the TCA cycle (Hansford, R G Curt Top. Bioenerg. 10:217-278 (1980)). A description and enzymes of this class can be found in above Example IV Exemplary BDO Pathways.

[0652] Branched-chain 2-keto-acid dehydrogenase complex (BCKAD), also known as 2-oxoisovalerate dehydrogenase, participates in branched-chain amino acid degradation pathways, converting 2-keto acids derivatives of valine, leucine and isoleucine to their acyl-CoA derivatives and CO2. A description and enzymes of this class can be found in above Example IV Exemplary BDO Pathways.

[0653] The pyruvate dehydrogenase complex, catalyzing the conversion of pyruvate to acetyl-CoA, has also been extensively studied. In the E. coli enzyme, specific residues in the E1 component are responsible for substrate specificity (Bisswanger, H. J Biol Chem. 256:815-822 (1981); Bremer, J. Eur. J Biochem. 8:535-540 (1969); Gong et al. J Biol Chem. 275:13645-13653 (2000)). A description and enzymes of this class can be found in above Example IV Exemplary BDO Pathways.

[0654] As an alternative to the large multienzyme 2-keto-acid dehydrogenase complexes described above, some anaerobic organisms utilize enzymes in the 2-ketoacid oxidoreductase family (OFOR) to catalyze acylating oxidative decarboxylation of 2-keto-acids. A description and enzymes of this class can be found in above Example IV Exemplary BDO Pathways.

### 1.2.1.d Oxidoreductase (Phosphonate Reductase).

[0655] The conversion of 4-hydroxybutyryl-phosphate to 4-hydroxybutanal can be catalyzed by an oxidoreductase in the EC class 1.2.1. Aspartate semialdehyde dehydrogenase (ASD, EC 1.2.1.11) catalyzes the NADPH-dependent reduction of 4-aspartyl phosphate to aspartate-4-semialdehyde. ASD participates in amino acid biosynthesis and recently has been studied as an antimicrobial target (Hadfield et al., Biochemistry 40:14475-14483 (2001). The E. coli ASD structure has been solved (Hadfield et al., J. Mol. Biol. 289:991-1002 (1999)) and the enzyme has been shown to accept the alternate substrate beta-3-methylaspartyl phosphate (Shames et al., J. Biol. Chem. 259:15331-15339 (1984)). The Haemophilus influenzae enzyme has been the subject of enzyme engineering studies to alter substrate binding affinities at the active site (Blanco et al., Acta Crystallogr. D. Biol. Crystallogr 60:1388-1395 (2004); Blanco et al., Acta Crystallogr. D. Biol. Crystallogr. 60:1808-1815 (2004)). Other ASD candidates are found in Mycobacterium tuberculosis (Shafiani et al., J. Appl. Microbiol. 98:832-838 (2005), Methanococcus jannaschii (Faehnle et al., J. Mol. Biol. 353:1055-1068 (2005)), and the infectious microorganisms Vibrio cholera and Heliobacter pylori (Moore et al., Protein Expr. Purif. 25:189-194 (2002)). A related enzyme candidate is acetylglutamylphosphate reductase (EC 1.2.1.38), an enzyme that naturally reduces acetylglutamylphosphate to acetylglutamate-5-semialdehyde, found in S. cerevisiae (Pauwels et al., Eur. J. Biochem. 270:1014-1024 (2003), B. subtilis (O'Reilly and Devine, Microbiology 140 (Pt 5):1023-1025 (1994)). and other organisms.

| Gene | Accession No. | GI No. | Organism |
|---|---|---|---|
| asd | NP_417891.1 | 16131307 | Escherichia coli |
| asd | YP_248335.1 | 68249223 | Haemophilus influenzae |
| asd | AAB49996 | 1899206 | Mycobacterium tuberculosis |
| VC2036 | NP_231670 | 15642038 | Vibrio cholera |
| asd | YP_002301787.1 | 210135348 | Heliobacter pylori |
| ARG5,6 | NP_010992.1 | 6320913 | Saccharomyces cerevisiae |
| argC | NP_389001.1 | 16078184 | Bacillus subtilis |

[0656] Other exemplary enzymes in this class include glyceraldehyde 3-phosphate dehydrogenase which converts glyceraldehyde-3-phosphate into D-glycerate 1,3-bisphosphate (for example, E. coli gapA (Branlant and Branlant, Eur. J. Biochem. 150:61-66 (1985)), N-acetyl-gamma-glutamyl-phosphate reductase which converts N-acetyl-L-glutamate-5-semialdehyde into N-acetyl-L-glutamyl-5-phosphate (for example, E. coli argC (Parsot et al., Gene 68:275-283 (1988)), and glutamate-5-semialdehyde dehydrogenase, which converts L-glutamate-5-semialdehyde into L-glutamyl-5-phospate (for example, E. coli proA (Smith et al., J. Bactetiol. 157:545-551 (1984)). Genes encoding glutamate-5-semialdehyde dehydrogenase enzymes from Salmonella typhimurium (Mahan and Csonka, J. Bacteriol. 156:1249-1262 (1983)) and Campylobacter jejuni (Louie and Chan, Mol. Gen. Genet. 240:29-35 (1993)) were cloned and expressed in E. coli.

| Gene | Accession No. | GI No. | Organism |
|---|---|---|---|
| gapA | P0A9B2.2 | 71159358 | Escherichia coli |
| argC | NP_418393.1 | 16131796 | Escherichia coli |
| proA | NP_414778.1 | 16128229 | Escherichia coli |
| proA | NP_459319.1 | 16763704 | Salmonella typhimurium |
| proA | P53000.2 | 9087222 | Campylobacter jejuni |

### 1.2.1.e Acid Reductase.

[0657] Several steps in FIGS. 58, 62 and 63 depict the conversion of unactivated acids to aldehydes by an acid reductase. These include the conversion of 4-hydroxybutyrate, succinate, alpha-ketoglutarate, and 4-aminobutyrate to 4-hydroxybutanal, succinate semialdehyde, 2,5-dioxopentanoate, and 4-aminobutanal, respectively. One notable carboxylic acid reductase can be found in Nocardia iowensis which catalyzes the magnesium, ATP and NADPH-dependent reduction of carboxylic acids to their corresponding aldehydes (Venkitasubramanian et al., J. Biol. Chem. 282:478-485 (2007)). This enzyme is encoded by the car gene and was cloned and functionally expressed in E. coli (Venkitasubramanian et al., J. Biol. Chem. 282:478-485 (2007)). Expression of the npt gene product improved activity of the enzyme via post-transcriptional modification. The npt gene encodes a specific phosphopantetheine transferase (PPTase) that converts the inactive apo-enzyme to the active holo-enzyme. The natural substrate of this enzyme is vanillic acid, and the enzyme exhibits broad acceptance of aromatic and aliphatic substrates (Venkitasubramanian et al., in Biocatalysis in the Pharmaceutical and Biotechnology Industires, ed. R. N. Patel, Chapter 15, pp. 425-440, CRC Press LLC, Boca Raton, Fla. (2006)).

| Gene | Accession No. | GI No. | Organism |
|---|---|---|---|
| car | AAR91681.1 | 40796035 | Nocardia iowensis (sp. NRRL |
| | | | 5646) |
| npt | ABI83656.1 | 114848891 | Nocardia iowensis (sp. NRRL |
| | | | 5646) |

[0658] Additional car and npt genes can be identified based on sequence homology.

| Gene | Accession No. | GI No. | Organism |
|---|---|---|---|
| fadD9 | YP_978699.1 | 121638475 | Mycobacterium bovis |
| | | | BCG |
| BCG_2812c | YP_978898.1 | 121638674 | Mycobacterium bovis |
| | | | BCG |
| nfa20150 | YP_118225.1 | 54023983 | Nocardia farcinica IFM |
| | | | 10152 |
| nfa40540 | YP_120266.1 | 54026024 | Nocardia farcinica IFM |
| | | | 10152 |
| SGR_6790 | YP_001828302.1 | 182440583 | Streptomyces griseus |
| | | | subsp. griseus NBRC |
| | | | 13350 |
| SGR_665 | YP_001822177.1 | 182434458 | Streptomyces griseus |
| | | | subsp. griseus NBRC |
| | | | 13350 |

[0659] An additional enzyme candidate found in Streptomyces griseus is encoded by the griC and griD genes. This enzyme is believed to convert 3-amino-4-hydroxybenzoic acid to 3-amino-4-hydroxybenzaldehyde as deletion of either griC or griD led to accumulation of extracellular 3-acetylamino-4-hydroxybenzoic acid, a shunt product of 3-amino-4-hydroxybenzoic acid metabolism (Suzuki, et al., J. Antibiot. 60(6):380-387 (2007)). Co-expression of griC and griD with SGR_{—}665, an enzyme similar in sequence to the Nocardia iowensis npt, can be beneficial.

| Gene | Accession No. | GI No. | Organism |
|---|---|---|---|
| griC | 182438036 | YP_001825755.1 | Streptomyces griseus subsp. |
| | | | griseus NBRC 13350 |
| griD | 182438037 | YP_001825756.1 | Streptomyces griseus subsp. |
| | | | griseus NBRC 13350 |
| MSMEG_2956 | YP_887275.1 | YP_887275.1 | Mycobacterium smegmatis |
| | | | MC2 155 |
| MSMEG_5739 | YP_889972.1 | 118469671 | Mycobacterium smegmatis |
| | | | MC2 155 |
| MSMEG_2648 | YP_886985.1 | 118471293 | Mycobacterium smegmatis |
| | | | MC2 155 |
| MAP1040c | NP_959974.1 | 41407138 | Mycobacterium avium subsp. |
| | | | paratuberculosis K-10 |
| MAP2899c | NP_961833.1 | 41408997 | Mycobacterium avium subsp. |
| | | | paratuberculosis K-10 |
| MMAR_2117 | YP_001850422.1 | 183982131 | Mycobacterium marinum M |
| MMAR_2936 | YP_001851230.1 | 183982939 | Mycobacterium marinum M |
| MMAR_1916 | YP_001850220.1 | 183981929 | Mycobacterium marinum M |
| TpauDRAFT_33060 | ZP_04027864.1 | 227980601 | Tsukamurella paurometabola |
| | | | DSM 20162 |
| TpauDRAFT_20920 | ZP_04026660.1 | 227979396 | Tsukamurella paurometabola |
| | | | DSM 20162 |
| CPCC7001_1320 | ZP_05045132.1 | 254431429 | Cyanobium PCC7001 |
| DDBDRAFT_0187729 | XP_636931.1 | 66806417 | Dictyostelium discoideum AX4 |

[0660] An enzyme with similar characteristics, alpha-aminoadipate reductase (AAR, EC 1.2.1.31), participates in lysine biosynthesis pathways in some fungal species. This enzyme naturally reduces alpha-aminoadipate to alpha-aminoadipate semialdehyde. The carboxyl group is first activated through the ATP-dependent formation of an adenylate that is then reduced by NAD(P)H to yield the aldehyde and AMP. Like CAR, this enzyme utilizes magnesium and requires activation by a PPTase. Enzyme candidates for AAR and its corresponding PPTase are found in Saccharomyces cerevisiae (Morris et al., Gene 98:141-145 (1991)), Candida albicans (Guo et al., Mol. Genet. Genomics 269:271-279 (2003)), and Schizosaccharomyces pombe (Ford et al., Curr. Genet. 28:131-137 (1995)). The AAR from S. pombe exhibited significant activity when expressed in E. coli (Guo et al., Yeast 21:1279-1288 (2004)). The AAR from Penicillium chrysogenum accepts S-carboxymethyl-L-cysteine as an alternate substrate, but did not react with adipate, L-glutamate or diaminopimelate (Hijarrubia et al., J. Biol. Chem. 278:8250-8256 (2003)). The gene encoding the P. chrysogenum PPTase has not been identified to date.

| Gene | Accession No. | GI No. | Organism |
|---|---|---|---|
| LYS2 | AAA34747.1 | 171867 | Saccharomyces cerevisiae |
| LYS5 | P50113.1 | 1708896 | Saccharomyces cerevisiae |
| LYS2 | AAC02241.1 | 2853226 | Candida albicans |
| LYS5 | AAO26020.1 | 28136195 | Candida albicans |
| Lys1p | P40976.3 | 13124791 | Schizosaccharomyces pombe |
| Lys7p | Q10474.1 | 1723561 | Schizosaccharomyces pombe |
| Lys2 | CAA74300.1 | 3282044 | Penicillium chrysogenum |

### 1.4.1.a Oxidoreductase (Aminating).

[0661] Glutamate dehydrogenase (Step J, FIGS. 62 and 63), 4-aminobutyrate dehydrogenase (Step M, FIGS. 62 and 63), putrescine dehydrogenase (Step D, FIG. 63), 5-amino-2-oxopentanoate dehydrogenase (Step P, FIG. 63), and omithine dehydrogenase (Step S, FIG. 63) can be catalyzed by aminating oxidoreductases. Enzymes in this EC class catalyze the oxidative deamination of alpha-amino acids with NAD+ or NADP+ as acceptor, and the reactions are typically reversible. Exemplary oxidoreductases operating on amino acids include glutamate dehydrogenase (deaminating), encoded by gdhA, leucine dehydrogenase (deaminating), encoded by ldh, and aspartate dehydrogenase (deaminating), encoded by nadX Description and exemplary enzymes can be found above in EXAMPLE IV Exemplary BDO Pathways, section on EC 1.4.1.a—Oxidoreductase operating on amino acids.

[0662] Additional glutamate dehydrogenase gene candidates are found in Bacillus subtilis (Khan et al., Biosci. Biotechnol. Biochem. 69:1861-1870 (2005)), Nicotiana tabacum (Purnell et al., Planta 222:167-180 (2005)), Oryza saliva (Abiko et al., Plant Cell Physiol. 46:1724-1734 (2005)), Haloferax mediterranei (Diaz et al., Extremophiles 10:105-115 (2006)) and Halobactreium salinarum (Hayden et al., FEMS Microbiol. Lett. 211:37-41(2002)). The Nicotiana tabacum enzyme is composed of alpha and beta subunits encoded by gdh1 and gdh2 (Purnell et al., Planta 222:167-180 (2005)). Overexpression of the NADH-dependent glutamate dehydrogenase was found to improve ethanol production in engineered strains of S. cerevisiae (Roca et al., Appl. Environ. Microbiol. 69:4732-4736 (2003)).

| Gene | Accession No. | GI No. | Organism |
|---|---|---|---|
| rocG | NP_391659.1 | 16080831 | Bacillus subtilis |
| gdh1 | AAR11534.1 | 38146335 | Nicotiana tabacum |
| gdh2 | AAR11535.1 | 38146337 | Nicotiana tabacum |
| GDH | Q852M0 | 75243660 | Oryza sativa |
| GDH | Q977U6 | 74499858 | Haloferax mediterranei |
| GDH | P29051 | 118549 | Halobactreium salinarum |
| GDH2 | NP_010066.1 | 6319986 | Saccharomyces cerevisiae |

[0663] An exemplary enzyme for catalyzing the conversion of aldehydes to their corresponding primary amines is lysine 6-dehydrogenase (EC 1.4.1.18), encoded by the lysDH genes. The lysine 6-dehydrogenase (deaminating), encoded by lysDH gene, catalyze the oxidative deamination of the ε-amino group of L-lysine to form 2-aminoadipate-6-semialdehyde, which in turn nonenzymatically cyclizes to form Δ1-piperideine-6-carboxylate (Misono and Nagasaki, J. Bacteriol. 150:398-401 (1982)). The lysDH gene from Geobacillus stearothermophilus encodes a thermophilic NAD-dependent lysine 6-dehydrogenase (Heydari et al., Appl. Environ. Microbiol 70:937-942 (2004)). The lysDH gene from Aeropyrum pernix K1 is identified through homology from genome projects. Additional enzymes can be found in Agrobacterium tumefaciens (Hashimoto et al., J. Biochem. 106:76-80 (1989); Misono and Nagasaki, J. Bacteriol. 150:398-401 (1982)) and Achromobacter denitrificans (Ruldeekulthamrong et al., BMB. Rep. 41:790-795 (2008)).

| Gene | Accession No. | GI No. | Organism |
|---|---|---|---|
| lysDH | BAB39707 | 13429872 | Geobacillus stearothermophilus |
| lysDH | NP_147035.1 | 14602185 | Aeropyrum pernix K1 |
| lysDH | NP_353966 | 15888285 | Agrobacterium tumefaciens |
| lysDH | AAZ94428 | 74026644 | Achromobacter denitrificans |

[0664] An enzyme that converts 3-oxoacids to 3-amino acids is 3,5-diaminohexanoate dehydrogenase (EC 1.4.1.11), an enzyme found in organisms that ferment lysine. The gene encoding this enzyme, kdd, was recently identified in Fusobacterium nucleatum (Kreimeyer et al., J. Biol. Chem. 282:7191-7197 (2007)). The enzyme has been purified and characterized in other organisms (Baker et al., J. Biol. Chem. 247:7724-7734 (1972); Baker and and van der Drift, Biochemistry 13:292-299 (1974)), but the genes associated with these enzymes are not known. Candidates in Myxococcus xanthus, Porphyromonas gingivalis W83 and other sequenced organisms can be inferred by sequence homology

| Gene | Accession No. | GI No. | Organism |
|---|---|---|---|
| kdd | AAL93966.1 | 19713113 | Fusobacterium nucleatum |
| mxan_4391 | ABF87267.1 | 108462082 | Myxococcus xanthus |
| pg_1069 | AAQ66183.1 | 34397119 | Porphyromonas gingivalis |

### 2.3.1.a Acyltransferase (Transferring Phosphate Group to CoA).

[0665] Step P of FIG. 62 depicts the transformation of 4-hydroxybutyryl-CoA to 4-hydroxybutyryl-Pi. Exemplary phosphate transferring acyltransferases include phosphotransacetylase, encoded by pta, and phosphotransbutyrylase, encoded by ptb. Description and exemplary enzymes can be found above in EXAMPLE IV Exemplary BDO Pathways, section on EC 2.3.1.a—Acyltransferase.

### 2.6.1. Aminotransferase.

[0666] Aminotransferases reversibly convert an aldehyde or ketone to an amino group. Common amino donor/acceptor combinations include glutamate/alpha-ketoglutarate, alanine/pyruvate, and aspartate/oxaloacetate. Several enzymes have been shown to convert aldehydes to primary amines, and vice versa, such as 4-aminobutyrate, putrescine, and 5-amino-2-oxopentanoate. These enzymes are particularly well suited to carry out the following transformations: Step N in FIGS. 62 and 63, Steps E and Q in FIG. 63. Lysine-6-aminotransferase (EC 2.6.1.36) is one exemplary enzyme capable of forming a primary amine. This enzyme function, converting lysine to alpha-aminoadipate semialdehyde, has been demonstrated in yeast and bacteria. Candidates from Candida utilis (Hammer and Bode, J. Basic Microbiol. 32:21-27 (1992)), Flavobacterium lutescens (Fujii et al., J. Biochem. 128:391-397 (2000)) and Streptomyces clavuligenus (Romero et al., J. Ind. Microbiol. Biotechnol. 18:241-246 (1997)) have been characterized. A recombinant lysine-6-aminotransferase from S. clavuligenus was functionally expressed in E. coli (Tobin et al., J. Bacteriol. 173:6223-6229 (1991)). The F. lutescens enzyme is specific to alpha-ketoglutarate as the amino acceptor (Soda and Misono, Biochemistry 7:4110-4119 (1968)). Other enzymes which convert aldehydes to terminal amines include the dat gene product in Acinetobacter baumanii encoding 2,4-diaminobutanoate:2-ketoglutarate 4-transaminase (Ikai and Yamamoto, J. Bacteriol. 179:5118-5125 (1997)). In addition to its natural substrate, 2,4-diaminobutyrate, DAT transaminates the terminal amines of lysine, 4-aminobutyrate and ornithine.

| Gene | Accession No. | GI No. | Organism |
|---|---|---|---|
| lat | BAB13756.1 | 10336502 | Flavobacterium lutescens |
| lat | AAA26777.1 | 153343 | Streptomyces clavuligenus |
| dat | P56744.1 | 6685373 | Acinetobacter baumanii |

[0667] The conversion of an aldehyde to a terminal amine can also be catalyzed by gamma-aminobutyrate transaminase (GABA transaminase or 4-aminobutyrate transaminase). This enzyme naturally interconverts succinic semialdehyde and glutamate to 4-aminobutyrate and alpha-ketoglutarate and is known to have a broad substrate range (Liu et al., Biochemistry 43:10896-10905 2004); Schulz et al., Appl. Environ. Microbiol. 56:1-6 (1990)). The two GABA transaminases in E. coli are encoded by gabT (Bartsch et al., J. Bacteriol. 172:7035-7042 (1990)) and puuE (Kurihara et al., J. Biol. Chem. 280:4602-4608. (2005)). GABA transaminases in Mus musculus, Pseudomonas fluorescens, and Sus scrofa have been shown to react with a range of alternate substrates including 6-aminocaproic acid (Cooper, Methods Enzymol. 113:80-82 (1985); Scott and Jakoby, J. Biol. Chem. 234:932-936 (1959)).

| Gene | Accession No. | GI No. | Organism |
|---|---|---|---|
| gabT | NP_417148.1 | 16130576 | Escherichia coli |
| puuE | NP_415818.1 | 16129263 | Escherichia coli |
| abat | NP_766549.2 | 37202121 | Mus musculus |
| gabT | YP_257332.1 | 70733692 | Pseudomonas fluorescens |
| abat | NP_999428.1 | 47523600 | Sus scrofa |

[0668] Additional enzyme candidates for interconverting aldehydes and primary amines are putrescine transminases or other diamine aminotransferases. The E. coli putrescine aminotransferase is encoded by the ygiG gene, and the purified enzyme also was able to transaminate cadaverine and spermidine (Samsonova et al., BMC Microbiol. 3:2 (2003)). In addition, activity of this enzyme on 1,7-diaminoheptane and with amino acceptors other than 2-oxoglutarate (for example, pyruvate, 2-oxobutanoate) has been reported (Kim, J. Biol. Chem. 239:783-786 (1964); Samsonova et al., BMC Microbiol. 3:2 (2003)). A putrescine aminotransferase with higher activity with pyruvate as the amino acceptor than alpha-ketoglutarate is the spuC gene of Pseudomonas aeruginosa (Lu et al., J. Bactetiol. 184:3765-3773 (2002)).

| Gene | Accession No. | GI No. | Organism |
|---|---|---|---|
| ygjG | NP_417544 | 145698310 | Escherichia coli |
| spuC | AAG03688 | 9946143 | Pseudomonas aeruginosa |

[0669] Enzymes that transaminate 3-oxoacids include GABA aminotransferase (described above), beta-alanine/alpha-ketoglutarate aminotransferase and 3-amino-2-methylpropionate aminotransferase. Beta-alanine/alpha-ketoglutarate aminotransferase (WO08027742) reacts with beta-alanine to form malonic semialdehyde, a 3-oxoacid. The gene product of SkPYD4 in Saccharomyces kluyveri was shown to preferentially use beta-alanine as the amino group donor (Andersen and Hansen, Gene 124:105-109 (1993)). SkUGA1 encodes a homologue of Saccharomyces cerevisiae GABA aminotransferase, UGA1 (Ramos et al., Eur J. Biochem. 149:401-404 (1985)), whereas SkPYD4 encodes an enzyme involved in both beta-alanine and GABA transamination (Andersen and Hansen, Gene 124:105-109 (1993)). 3-Amino-2-methylpropionate transaminase catalyzes the transformation from methylmalonate semialdehyde to 3-amino-2-methylpropionate. The enzyme has been characterized in Rattus norvegicus and Sus scrofa and is encoded by Abat (Kakimoto et al., Biochim. Biophys. Acta 156:374-380 (1968); Tamaki et al., Methods Enzymol. 324:376-389 (2000)).

| Gene | Accession No. | GI No. | Organism |
|---|---|---|---|
| SkyPYD4 | ABF58893.1 | 98626772 | Lachancea kluyveri |
| SkUGA1 | ABF58894.1 | 98626792 | Lachancea kluyveri |
| UGA1 | NP_011533.1 | 6321456 | Saccharomyces cerevisiae |
| Abat | P50554.3 | 122065191 | Rattus norvegicus |
| Abat | P80147.2 | 120968 | Sus scrofa |

[0670] Several aminotransferases transaminate the amino groups of amino acids to form 2-oxoacids. Aspartate aminotransferase is an enzyme that naturally transfers an oxo group from oxaloacetate to glutamate, forming alpha-ketoglutarate and aspartate. Aspartate is similar in structure to OHED and 2-AHD. Aspartate aminotransferase activity is catalyzed by, for example, the gene products of aspC from Escherichia coli (Yagi et al., FEBS Lett. 100:81-84 (1979); Yagi et al., Methods Enzymol. 113:83-89 (1985)), AAT2 from Saccharomyces cerevisiae (Yagi et al., J. Biochem. 92:35-43 (1982)) and ASPS from Arabidopsis thaliana (de la Torre et al., Plant J. 46:414-425 (2006); Kwok and Hanson. J. Exp. Bot. 55:595-604 (2004); Wilkie and Warren, Protein Expr. Purif. 12:381-389 (1998)). The enzyme from Rattus norvegicus has been shown to transaminate alternate substrates such as 2-aminohexanedioic acid and 2,4-diaminobutyric acid (Recasens et al., Biochemistry 19:4583-4589 (1980)). Aminotransferases that work on other amino-acid substrates can also be able to catalyze this transformation. Valine aminotransferase catalyzes the conversion of valine and pyruvate to 2-ketoisovalerate and alanine. The E. coli gene, avtA, encodes one such enzyme (Whalen and Berg, J. Bacteriol. 150:739-746 (1982)). This gene product also catalyzes the transamination of α-ketobutyrate to generate α-aminobutyrate, although the amine donor in this reaction has not been identified (Whalen and Berg, J. Bacteriol. 158:571-5741984)). The gene product of the E. coli serf catalyzes two reactions, phosphoserine aminotransferase and phosphohydroxythreonine aminotransferase (Lam and Winkler, J. Bacteriol. 172:6518-6528 (1990)), and activity on non-phosphorylated substrates could not be detected (Drewke et al., FEBS Lett. 390:179-182 (1996)).

| Gene | Accession No. | GI No. | Organism |
|---|---|---|---|
| aspC | NP_415448.1 | 16128895 | Escherichia coli |
| AAT2 | P23542.3 | 1703040 | Saccharomyces cerevisiae |
| ASP5 | P46248.2 | 20532373 | Arabidopsis thaliana |
| Got2 | P00507 | 112987 | Rattus norvegicus |
| avtA | YP_026231.1 | 49176374 | Escherichia coli |
| serC | NP_415427.1 | 16128874 | Escherichia coli |

[0671] Another enzyme candidate is alpha-aminoadipate aminotransferase (EC 2.6.1.39), an enzyme that participates in lysine biosynthesis and degradation in some organisms. This enzyme interconverts 2-aminoadipate and 2-oxoadipate, using alpha-ketoglutarate as the amino acceptor. Gene candidates are found in Homo sapiens (Okuno et al., Enzyme Protein 47:136-148 (1993)) and Thermus thermophilus (Miyazaki et al., Microbiology 150:2327-2334 (2004)). The Thermus thermophilus enzyme, encoded by lysN is active with several alternate substrates including oxaloacetate, 2-oxoisocaproate, 2-oxoisovalerate, and 2-oxo-3-methylvalerate.

| Gene | Accession No. | GI No. | Organism |
|---|---|---|---|
| lysN | BAC76939.1 | 31096548 | Thermus thermophilus |
| AadAT-II | Q8N5Z0.2 | 46395904 | Homo sapiens |

### 2.7.2.a Phosphotransferase (Carboxy Acceptor).

[0672] Phosphotransferase enzymes in the EC class 2.7.2 transform carboxylic acids to phosphonic acids with concurrent hydrolysis of one ATP. Step O of FIG. 62 involves the conversion of 4-hydroxybutyrate to 4-hydroxybutyryl-phosphate by such an enzyme. Butyrate kinase (EC 2.7.2.7) carries out the reversible conversion of butyryl-phosphate to butyrate during acidogenesis in C. acetobutylicum (Cary et al., Appl. Environ. Microbiol. 56:1576-1583 (1990)). This enzyme is encoded by either of the two buk gene products (Huang et al., J. Mol. Microbiol. Biotechnol. 2:33-38 (2000)). Other butyrate kinase enzymes are found in C. butyricum and C. tetanomorphum (Twarog and Wolfe, J. Bacteriol. 86:112-117 (1963)). Related enzyme isobutyrate kinase from Thermotoga maritima has also been expressed in E. coli and crystallized (Diao et al., Acta Crystallogr D. Biol. Crystallogr 59:1100-1102 (2003); Diao and Hasson, J. Bacteriol. 191:2521-2529 (2009)). Aspartokinase catalyzes the ATP-dependent phosphorylation of aspartate and participates in the synthesis of several amino acids. The aspartokinase III enzyme in E. coli, encoded by lysC, has a broad substrate range, and the catalytic residues involved in substrate specificity have been elucidated (Keng and Viola, Arch. Biochem. Biophys. 335:73-81 (1996)). Two additional kinases in E. coli are also good candidates: acetate kinase and gamma-glutamyl kinase. The E. coli acetate kinase, encoded by ackA (Skarstedt and Silverstein, J. Biol. Chem. 251:6775-6783 (1976)), phosphorylates propionate in addition to acetate (Hesslinger et al., Mol. Microbiol. 27:477-492 (1998)). The E. coli gamma-glutamyl kinase, encoded by proB (Smith et al., J. Bacteriol. 157:545-551 (1984)), phosphorylates the gamma carbonic acid group of glutamate.

| Gene | Accession No. | GI No. | Organism |
|---|---|---|---|
| buk1 | NP_349675 | 15896326 | Clostridium acetobutylicum |
| buk2 | Q97II1 | 20137415 | Clostridium acetobutylicum |
| buk2 | Q9X278.1 | 6685256 | Thermotoga maritima |
| lysC | NP_418448.1 | 16131850 | Escherichia coli |
| ackA | NP_416799.1 | 16130231 | Escherichia coli |
| proB | NP_414777.1 | 16128228 | Escherichia coli |

[0673] Acetylglutamate kinase phosphorylates acetylated glutamate during arginine biosynthesis. This enzyme is not known to accept alternate substrates; however, several residues of the E. coli enzyme involved in substrate binding and phosphorylation have been elucidated by site-directed mutagenesis (Marco-Marin et al., J. Mol. Biol. 334:459-476 (2003); Ramon-Maiques et al., Structure 10:329-342 (2002)). The enzyme is encoded by atgB in Bacillus subtilis and E. coli (Parsot et al., Gene 68:275-283 (1988)), and ARG5,6 in S. cerevisiae (Pauwels et al., Eur J. Biochem. 270:1014-1024 (2003)). The ARG5,6 gene of S. cerevisiae encodes a polyprotein precursor that is matured in the mitochondrial matrix to become acetylglutamate kinase and acetylglutamylphosphate reductase.

| Gene | Accession No. | GI No. | Organism |
|---|---|---|---|
| argB | NP_418394.3 | 145698337 | Escherichia coli |
| argB | NP_389003.1 | 16078186 | Bacillus subtilis |
| ARG5,6 | NP_010992.1 | 6320913 | Saccharomyces cerevisiae |

### 2.8.3.a CoA Transferase.

[0674] The gene products of cat1, cat2, and cat3 of Clostridium kluyveri have been shown to exhibit succinyl-CoA (Step G, FIGS. 62 and 63), 4-hydroxybutyryl-CoA (Step T, FIG. 62), and butyryl-CoA acetyltransferase activity, respectively (Seedorf et al., Proc. Natl. Acad. Sci. USA 105:2128-2133 (2008); Sohling and Gottschalk, J Bacteriol 178:871-880 (1996)). Similar CoA transferase activities are also present in Trichomonas vaginalis (van Grinsven et al., J. Biol. Chem. 283:1411-1418 (2008)) and Trypanosoma brucei (Riviere et al., J. Biol. Chem. 279:45337-45346 (2004)).

| Gene | Accession No. | GI No. | Organism |
|---|---|---|---|
| cat1 | P38946.1 | 729048 | Clostridium kluyveri |
| cat2 | P38942.2 | 1705614 | Clostridium kluyveri |
| cat3 | EDK35586.1 | 146349050 | Clostridium kluyveri |
| TVAG_395550 | XP_001330176 | 123975034 | Trichomonas |
| | | | vaginalis G3 |
| Tb11.02.0290 | XP_828352 | 71754875 | Trypanosoma brucei |

[0675] An additionally useful enzyme for this type of transformation is acyl-CoA:acetate-CoA transferase, also known as acetate-CoA transferase (EC 2.8.3.8), which has been shown to transfer the CoA moiety to acetate from a variety of branched and linear acyl-CoA substrates, including isobutyrate (Matthies and Schink, Appl. Environ. Microbiol. 58:1435-1439 (1992)), valerate (Vanderwinkel et al., Biochem. Biophys. Res. Commun. 33:902-908 (1968)) and butanoate (Vanderwinkel, supra (1968)). This enzyme is encoded by atoA (alpha subunit) and atoD (beta subunit) in E. coli sp. K12 (Korolev et al., Acta Crystallogr D Biol. Crystallogr. 58:2116-2121 (2002); Vanderwinkel, supra (1968)). Similar enzymes exist in Corynebacterium glutamicum ATCC 13032 (Duncan et al., Appl. Environ. Microbiol. 68:5186-5190 (2002)), Clostridium acetobutylicum (Cary et al., Appl. Environ. Microbiol. 56:1576-1583 (1990); Wiesenborn et al., Appl. Environ. Microbiol. 55:323-329 (1989)), and Clostridium saccharoperbutylacetonicum (Kosaka et al., Biosci. Biotechnol. Biochem. 71:58-68 (2007)).

| Gene | Accession No. | GI No. | Organism |
|---|---|---|---|
| atoA | P76459.1 | 2492994 | Escherichia coli K12 |
| atoD | P76458.1 | 2492990 | Escherichia coli K12 |
| actA | YP_226809.1 | 62391407 | Corynebacterium glutamicum |
| cg0592 | YP_224801.1 | 62389399 | Corynebacterium glutamicum |
| ctfA | NP_149326.1 | 15004866 | Clostridium acetobutylicum |
| ctfB | NP_149327.1 | 15004867 | Clostridium acetobutylicum |
| ctfA | AAP42564.1 | 31075384 | Clostridium |
| | | | saccharoperbutylacetonicum |
| ctfB | AAP42565.1 | 31075385 | Clostridium |
| | | | saccharoperbutylacetonicum |

[0676] The glutaconate-CoA-transferase (EC 2.8.3.12) enzyme from anaerobic bacterium Acidaminococcus fermentans reacts with diacid glutaconyl-CoA and 3-butenoyl-CoA (Mack and Buckel, FEBS Lett. 405:209-212 (1997)). The genes encoding this enzyme are gctA and gctB. This enzyme has reduced but detectable activity with other CoA derivatives including glutaryl-CoA, 2-hydroxyglutaryl-CoA, adipyl-CoA and acrylyl-CoA (Buckel et al., Eur. J. Biochem. 118:315-321(1981)). The enzyme has been cloned and expressed in E. coli (Mac et al., Eur. J. Biochem. 226:41-51(1994)).

| Gene | Accession No. | GI No. | Organism |
|---|---|---|---|
| gctA | CAA57199.1 | 559392 | Acidaminococcus fermentans |
| gctB | CAA57200.1 | 559393 | Acidaminococcus fermentans |

### 3.1.2.a CoA Hydrolase.

[0677] Enzymes in the 3.1.2 family hydrolyze acyl-CoA molecules to their corresponding acids. However, such enzymes can be modified to empart CoA-ligase or synthetase functionality if coupled to an energy source such as a proton pump or direct ATP hydrolysis. Several eukaryotic acetyl-CoA hydrolases (EC 3.1.2.1) have broad substrate specificity. For example, the enzyme from Rattus norvegicus brain (Robinson et al., Biochem. Biophys. Res. Commun. 71:959-965 (1976)) can react with butyryl-CoA, hexanoyl-CoA and malonyl-CoA. Though its sequence has not been reported, the enzyme from the mitochondrion of the pea leaf also has a broad substrate specificity, with demonstrated activity on acetyl-CoA, propionyl-CoA, butyryl-CoA, palmitoyl-CoA, oleoyl-CoA, succinyl-CoA, and crotonyl-CoA (Zeiher and Randall, Plant. Physiol. 94:20-27 (1990)). The acetyl-CoA hydrolase, ACH1, from S. cerevisiae represents another candidate hydrolase (Buu et al., J. Biol. Chem. 278:17203-17209 (2003)).

| Gene | Accession No. | GI No. | Organism |
|---|---|---|---|
| acot12 | NP_570103.1 | 18543355 | Rattus norvegicus |
| ACH1 | NP_009538 | 6319456 | Saccharomyces cerevisiae |

[0678] Another candidate hydrolase is the human dicarboxylic acid thioesterase, acot8, which exhibits activity on glutaryl-CoA, adipyl-CoA, suberyl-CoA, sebacyl-CoA, and dodecanedioyl-CoA (Westin et al., J. Biol. Chem. 280:38125-38132 (2005)) and the closest E. coli homolog, tesB, which can also hydrolyze a broad range of CoA thioesters (Naggert et al., J. Biol. Chem. 266:11044-11050 (1991)). A similar enzyme has also been characterized in the rat liver (Deana, Biochem. Int 26:767-773 (1992)). Other potential E. coli thioester hydrolases include the gene products of tad (Bonner and Bloch, J. Biol. Chem. 247:3123-3133 (1972)), ybgC (Kuznetsova et al., FEMS Microbiol. Rev. 29:263-279 (2005); Zhuang et al., FEBS Lett. 516:161-163 (2002)), paaI (Song et al., J. Biol. Chem. 281:11028-11038 (2006)), and ybdB (Leduc et al., J. Bacteriol. 189:7112-7126 (2007)).

| Gene | Accession No. | GI No. | Organism |
|---|---|---|---|
| acot8 | CAA15502 | 3191970 | Homo sapiens |
| tesB | NP_414986 | 16128437 | Escherichia coli |
| acot8 | NP_570112 | 51036669 | Rattus norvegicus |
| tesA | NP_415027 | 16128478 | Escherichia coli |
| ybgC | NP_415264 | 16128711 | Escherichia coli |
| paaI | NP_415914 | 16129357 | Escherichia coli |
| ybdB | NP_415129 | 16128580 | Escherichia coli |

[0679] Yet another candidate hydrolase is the glutaconate CoA-transferase from Acidaminococcus fermentans. This enzyme was transformed by site-directed mutagenesis into an acyl-CoA hydrolase with activity on glutaryl-CoA, acetyl-CoA and 3-butenoyl-CoA (Mack and Buckel, FEBS Lett. 405:209-212 (1997)). This indicates that the enzymes encoding succinyl-CoA:3-ketoacid-CoA transferases and acetoacetyl-CoA:acetyl-CoA transferases can also serve as candidates for this reaction step but would likely require certain mutations to change their function.

| Gene | Accession No. | GI No. | Organism |
|---|---|---|---|
| gctA | CAA57199.1 | 559392 | Acidaminococcus fermentans |
| gctB | CAA57200.1 | 559393 | Acidaminococcus fermentans |

[0680] Additional hydrolase enzymes include 3-hydroxyisobutyryl-CoA hydrolase which has been described to efficiently catalyze the conversion of 3-hydroxyisobutyryl-CoA to 3-hydroxyisobutyrate during valine degradation (Shimomura et al., J. Biol. Chem. 269:14248-14253 (1994)). Genes encoding this enzyme include hibch of Rattus norvegicus (Shimomura et al., supra (1994); Shimomura et al., Methods Enzymol. 324:229-240 (2000)) and Homo sapiens (Shimomura et al., supra (1994). Candidate genes by sequence homology include hibch of Saccharomyces cerevisiae and BC 2292 of Bacillus cereus.

| Gene | Accession No. | GI No. | Organism |
|---|---|---|---|
| hibch | Q5XIE6.2 | 146324906 | Rattus norvegicus |
| hibch | Q6NVY1.2 | 146324905 | Homo sapiens |
| hibch | P28817.2 | 2506374 | Saccharomyces cerevisiae |
| BC_2292 | AP09256 | 29895975 | Bacillus cereus |

### 4.1.1.a Carboxy-Lyase.

[0681] Decarboxylation of Alpha-Keto Acids.

[0682] Alpha-ketoglutarate decarboxylase (Step B, FIGS. 58, 62 and 63), 5-hydroxy-2-oxopentanoic acid decarboxylase (Step Z, FIG. 62), and 5-amino-2-oxopentanoate decarboxylase (Step R, FIG. 63) all involve the decarboxylation of an alpha-ketoacid. The decarboxylation of keto-acids is catalyzed by a variety of enzymes with varied substrate specificities, including pyruvate decarboxylase (EC 4.1.1.1), benzoylformate decarboxylase (EC 4.1.1.7), alpha-ketoglutarate decarboxylase and branched-chain alpha-ketoacid decarboxylase.

[0683] Pyruvate decarboxylase (PDC), also termed keto-acid decarboxylase, is a key enzyme in alcoholic fermentation, catalyzing the decarboxylation of pyruvate to acetaldehyde. The enzyme from Saccharomyces cerevisiae has a broad substrate range for aliphatic 2-keto acids including 2-ketobutyrate, 2-ketovalerate, 3-hydroxypyruvate and 2-phenylpyruvate (Davie et al., J. Biol. Chem. 267:16601-16606 (1992)). This enzyme has been extensively studied, engineered for altered activity, and functionally expressed in E. coli (Killenberg-Jabs et al., Eur J. Biochem. 268:1698-1704 (2001); Li and Jordan, Biochemistry 38:10004-10012 (1999); ter Schure et al., Appl. Environ. Microbiol. 64:1303-1307 (1998)). The PDC from Zymomonas mobilus, encoded by pdc, also has a broad substrate range and has been a subject of directed engineering studies to alter the affinity for different substrates (Siegert et al., Protein Eng. Des. Sel. 18:345-357 (2005)). The crystal structure of this enzyme is available (Killenberg-Jabs et al., Eur J. Biochem. 268:1698-1704 (2001)). Other well-characterized PDC candidates include the enzymes from Acetobacter pasteurians (Chandra et al., Arch. Microbiol. 176:443-451 (2001)) and Kluyveromyces lactis (Krieger et al., Eur J. Biochem. 269:3256-3263 (200211.

| Gene | Accession No. | GI No. | Organism |
|---|---|---|---|
| pdc | P06672.1 | 118391 | Zymomonas mobilus |
| pdc1 | P06169 | 30923172 | Saccharomyces cerevisiae |
| pdc | AM21208 | 20385191 | Acetobacter pasteurians |
| pdc1 | Q12629 | 52788279 | Kluyveromyces lactis |

[0684] Like PDC, benzoylformate decarboxylase (EC 4.1.1.7) has a broad substrate range and has been the target of enzyme engineering studies. The enzyme from Pseudomonas putida has been extensively studied and crystal structures of this enzyme are available (Hasson et al., Biochemistry 37:9918-9930 (1998); Polovnikova et al., Biochemistry 42:1820-1830 (2003). Site-directed mutagenesis of two residues in the active site of the Pseudomonas putida enzyme altered the affinity (Km) of naturally and non-naturally occurring substrates (Siegert et al., Protein Eng. Des. Sel. 18:345-357 (2005)). The properties of this enzyme have been further modified by directed engineering (Lingen et al., Protein Eng. 15:585-593 (2002); Lingen et al., Chembiochem. 4:721-726 (2003)). The enzyme from Pseudomonas aeruginosa, encoded by mdlC, has also been characterized experimentally (Barrowman et al., FEMS Microbiol. Lett. 34:57-60 (1986)). Additional gene candidates from Pseudomonas stutzeri, Pseudomonas fluorescens and other organisms can be inferred by sequence homology or identified using a growth selection system developed in Pseudomonas putida (Henning et al., Appl. Environ. Microbiol. 72:7510-7517 (2006)).

| Gene | Accession No. | GI No. | Organism |
|---|---|---|---|
| mdlC | P20906.2 | 3915757 | Pseudomonas putida |
| mdlC | Q9HUR2.1 | 81539678 | Pseudomonas aeruginosa |
| dpgB | ABN80423.1 | 126202187 | Pseudomonas stutzeri |
| ilvB-1 | YP_260581.1 | 70730840 | Pseudomonas fluorescens |

[0685] A third enzyme capable of decarboxylating 2-oxoacids is alpha-ketoglutarate decarboxylase (KGD). The substrate range of this class of enzymes has not been studied to date. The KDC from Mycobacterium tuberculosis (Tian et al., Proc. Natl. Acad. Sci. USA 102:10670-10675 (2005)) has been cloned and functionally expressed. However, it is not an ideal candidate for strain engineering because it is large (˜130 kD) and GC-rich. KDC enzyme activity has been detected in several species of rhizobia including Bradyrhizobium japonicum and Mesorhizobium loti (Green et al., J. Bacteriol. 182:2838-2844 (2000). Although the KDC-encoding gene(s) have not been isolated in these organisms, the genome sequences are available, and several genes in each genome are annotated as putative KDCs. A KDC from Euglena gracilis has also been characterized, but the gene associated with this activity has not been identified to date (Shigeoka and Nakano, Arch. Biochem. Biophys. 288:22-28 (1991)). The first twenty amino acids starting from the N-terminus were sequenced (MTYKAPVKDVKFLLDKVFKV; SEQ ID NO:45) (Shigeoka and Nakano, Arch. Biochem. Biophys. 288:22-28 (1991)). The gene can be identified by testing candidate genes containing this N-terminal sequence for KDC activity

| Gene | Accession No. | GI No. | Organism |
|---|---|---|---|
| kgd | O50463.4 | 160395583 | Mycobacterium tuberculosis |
| kgd | NP_767092.1 | 27375563 | Bradyrhizobium japonicum |
| kgd | NP_105204.1 | 13473636 | Mesorhizobium loti |

[0686] A fourth candidate enzyme for catalyzing this reaction is branched chain alpha-ketoacid decarboxylase (BCKA). This class of enzyme has been shown to act on a variety of compounds varying in chain length from 3 to 6 carbons (Oku and Kaneda, J. Biol. Chem. 263:18386-18396 (1988); Smit et al., B. A., J. E. Hylckama Vlieg, W. J. Engels, L. Meijer, J. T. Wouters, and G Smit. Identification, cloning, and characterization of a Lactococcus lactis branched-chain alpha-keto acid decarboxylase involved in flavor formation. Appl. Environ. Microbiol. 71:303-311 (2005)). The enzyme in Lactococcus lactis has been characterized on a variety of branched and linear substrates including 2-oxobutanoate, 2-oxohexanoate, 2-oxopentanoate, 3-methyl-2-oxobutanoate, 4-methyl-2-oxobutanoate and isocaproate (Smit et al., Appl. Environ. Microbiol. 71:303-311(2005)). The enzyme has been structurally characterized (Berg et al., Science 318:1782-1786 (2007)). Sequence alignments between the Lactococcus lactis enzyme and the pyruvate decarboxylase of Zymomonas mobilus indicate that the catalytic and substrate recognition residues are nearly identical (Siegert et al., Protein Eng. Des. Sel. 18:345-357 (2005)), so this enzyme would be a promising candidate for directed engineering. Decarboxylation of alpha-ketoglutarate by a BCKA was detected in Bacillus subtilis; however, this activity was low (5%) relative to activity on other branched-chain substrates (Oku and Kaneda. Biosynthesis of branched-chain fatty acids in Bacillus subtilis. A decarboxylase is essential for branched-chain fatty acid synthetase. J. Biol. Chem. 263:18386-18396 (1988)), and the gene encoding this enzyme has not been identified to date. Additional BCKA gene candidates can be identified by homology to the Lactococcus lactis protein sequence. Many of the high-scoring BLASTp hits to this enzyme are annotated as indolepyruvate decarboxylases (EC 4.1.1.74). Indolepyruvate decarboxylase (IPDA) is an enzyme that catalyzes the decarboxylation of indolepyruvate to indoleacetaldehyde in plants and plant bacteria.

| Gene | Accession No. | GI No. | Organism |
|---|---|---|---|
| kdcA | AAS49166.1 | 44921617 | Lactococcus lactis |

[0687] Recombinant branched chain alpha-keto acid decarboxylase enzymes derived from the E1 subunits of the mitochondrial branched-chain keto acid dehydrogenase complex from Homo sapiens and Bos taurus have been cloned and functionally expressed in E. coli (Davie et al., J Biol. Chem. 267:16601-16606 1992); Wynn et al., J Biol. Chem. 267:1881-1887 (1992); Wynn et al., J Biol. Chem. 267:12400-12403 (1992)). In these studies, the authors found that co-expression of chaperonins GroEL and GroES enhanced the specific activity of the decarboxylase by 500-fold (Wynn et al., J. Biol. Chem. 267:12400-12403 (1992)). These enzymes are composed of two alpha and two beta subunits.

| Gene | Accession No. | GI No. | Organism |
|---|---|---|---|
| BCKDHB | NP_898871.1 | 34101272 | Homo sapiens |
| BCKDHA | NP_000700.1 | 11386135 | Homo sapiens |
| BCKDHB | P21839 | 115502434 | Bos taurus |
| BCKDHA | P11178 | 129030 | Bos taurus |

[0688] Decarboxylation of Alpha-Keto Acids.

[0689] Several ornithine decarboxylase (Step U, FIG. 63) enzymes also exhibit activity on lysine and other similar compounds. Such enzymes are found in Nicotiana glutinosa (Lee and Cho, Biochem. J. 360:657-665 (2001)), Lactobacillus sp. 30a (Guirard and Snell, J Biol. Chem. 255:5960-5964 (1980)) and Vibrio vulnificus (Lee et al., J Biol. Chem. 282:27115-27125 (2007)). The enzymes from Lactobacillus sp. 30a (Momany et al., J Mol. Biol. 252:643-655 (1995)) and V. vulnificus have been crystallized. The V. vulnificus enzyme efficiently catalyzes lysine decarboxylation, and the residues involved in substrate specificity have been elucidated (Lee et al., J. Biol. Chem. 282:27115-27125 (2007)). A similar enzyme has been characterized in Trichomonas vaginalis, but the gene encoding this enzyme is not known (Yarlett et al., Biochem. J. 293 (Pt 2):487-493 (1993)).

| Gene | Accession No. | GI No. | Organism |
|---|---|---|---|
| AF323910.1:1..1299 | AAG45222.1 | 12007488 | Nicotiana glutinosa |
| odc1 | P43099.2 | 1169251 | Lactobacillus sp. 30a |
| VV2_1235 | NP_763142.1 | 27367615 | Vibrio vulnificus |

[0690] Glutamate decarboxylase enzymes (Step L, FIGS. 62 and 63) are also well-characterized. Exemplary glutamate decarboxylases can be found in E. coli (De Biase et al., Protein Expr. Purif. 8:430-438 (1996)), S. cerevisiae (Coleman et al., J Biol. Chem. 276:244-250 (2001)), and Homo sapiens (Bu et al., Proc. Natl. Acad. Sci. USA 89:2115-2119 (1992); Bu and Tobin, Genomics 21:222-228 (1994)).

| Gene | Accession No. | GI No. | Organism |
|---|---|---|---|
| GAD1 | NP_000808 | 58331246 | Homo sapiens |
| GAD2 | NP_001127838 | 197276620 | Homo sapiens |
| gadA | NP_417974 | 16131389 | Escherichia coli |
| gadB | NP_416010 | 16129452 | Escherichia coli |
| GAD1 | NP_013976 | 6323905 | Saccharomyces cerevisiae |

[0691] Lysine decarboxylase (EC 4.1.1.18) catalyzes the decarboxylation of lysine to cadaverine. Two isozymes of this enzyme are encoded in the E. coli genome by genes cadA and ldcC. CadA is involved in acid resistance and is subject to positive regulation by the cadC gene product (Lemonnier and Lane, Microbiology 144 (Pt 3):751-760 (1998)). CadC accepts hydroxylysine and S-aminoethylcysteine as alternate substrates, and 2-Aminopimelate and 6-ACA act as competitive inhibitors to this enzyme (Sabo et al., Biochemistry 13:662-670 (1974)). Directed evolution or other enzyme engineering methods can be utilized to increase the activity for this enzyme to decarboxylate 2-aminopimelate. The constitutively expressed ldc gene product is less active than CadA (Lemonnier and Lane, Microbiology 144 (Pt 3):751-760 (1998)). A lysine decarboxylase analogous to CadA was recently identified in Vibrio parahaemolyticus (Tanaka et al., J. Appl. Microbiol. 104:1283-1293 (2008)). The lysine decarboxylase from Selenomonas ruminantium, encoded by ldc, bears sequence similarity to eukaryotic omithine decarboxylases, and accepts both L-lysine and L-omithine as substrates (Takatsuka et al., Biosci. Biotechnol. Biochem. 63:1843-1846 (1999)). Active site residues were identified and engineered to alter the substrate specificity of the enzyme (Takatsuka et al., J. Bacteriol. 182:6732-6741 (2000)).

| Gene | Accession No. | GI No. | Organism |
|---|---|---|---|
| cadA | AAA23536.1 | 145458 | Escherichia coli |
| ldcC | AAC73297.1 | 1786384 | Escherichia coli |
| ldc | O50657.1 | 13124043 | Selenomonas |
| | | | ruminantium |
| cadA | AB124819.1 | 44886078 | Vibrio |
| | | | parahaemolyticus |

### 6.2.1.a CoA Synthetase.

[0692] CoA synthetase or ligase reactions are required by Step I of FIGS. 62 and 63, and Step V of FIG. 62. Succinate or 4-hydroxybutyrate are the required substrates. Exemplary genes encoding enzymes likely to carry out these transformations include the sucCD genes of E. coli, which naturally form a succinyl-CoA synthetase complex. This enzyme complex naturally catalyzes the formation of succinyl-CoA from succinate with the concomitant consumption of one ATP, a reaction which is reversible in vivo (Buck et al., Biochem. 24:6245-6252 (1985)).

| Gene | Accession No. | GI No. | Organism |
|---|---|---|---|
| sucC | NP_415256.1 | 16128703 | Escherichia coli |
| sucD | AAC73823.1 | 1786949 | Escherichia coli |

[0693] Additional exemplary CoA-ligases include the rat dicarboxylate-CoA ligase for which the sequence is yet uncharacterized (Vamecq et al., Biochemical J. 230:683-693 (1985)), either of the two characterized phenylacetate-CoA ligases from P. chrysogenum (Lamas-Maceiras et al., Biochem. J. 395:147-155 (2005); Wang et al., Biochem Biophy Res Commun 360(2):453-458 (2007)), the phenylacetate-CoA ligase from Pseudomonas putida (Martinez-Blanco et al., J. Biol. Chem. 265:7084-7090 (1990)), and the 6-carboxyhexanoate-CoA ligase from Bacillus subtilis (Bower et al., J. Bacteriol. 178(14):4122-4130 (1996)). Additional candidate enzymes are acetoacetyl-CoA synthetases from Mus musculus (Hasegawa et al., Biochim. Biophys. Acta 1779:414-419 (2008)) and Homo sapiens (Ohgami et al., Biochem. Pharmacol. 65:989-994 (2003)), which naturally catalyze the ATP-dependant conversion of acetoacetate into acetoacetyl-CoA. 4-Hydroxybutyryl-CoA synthetase activity has been demonstrated in Metallosphaera sedula (Berg et al., Science 318:1782-1786 (2007)). This function has been tentatively assigned to the Msed_{—}1422 gene.

| Gene | Accession No. | GI No. | Organism |
|---|---|---|---|
| phl | CAJ15517.1 | 77019264 | Penicillium chrysogenum |
| phlB | ABS19624.1 | 152002983 | Penicillium chrysogenum |
| paaF | AAC24333.2 | 22711873 | Pseudomonas putida |
| bioW | NP_390902.2 | 50812281 | Bacillus subtilis |
| AACS | NP_084486.1 | 21313520 | Mus musculus |
| AACS | NP_076417.2 | 31982927 | Homo sapiens |
| Msed_1422 | YP_001191504 | 146304188 | Metallosphaera sedula |

[0694] ADP-forming acetyl-CoA synthetase (ACD, EC 6.2.1.13) is another candidate enzyme that couples the conversion of acyl-CoA esters to their corresponding acids with the concurrent synthesis of ATP Several enzymes with broad substrate specificities have been described in the literature. ACD I from Archaeoglobus fulgidus, encoded by AF1211, was shown to operate on a variety of linear and branched-chain substrates including acetyl-CoA, propionyl-CoA, butyryl-CoA, acetate, propionate, butyrate, isobutyryate, isovalerate, succinate, fumarate, phenylacetate, indoleacetate (Musfeldt et al., J. Bacteriol. 184:636-644 (2002)). The enzyme from Haloarcula marismortui (annotated as a succinyl-CoA synthetase) accepts propionate, butyrate, and branched-chain acids (isovalerate and isobutyrate) as substrates, and was shown to operate in the forward and reverse directions (Brasen et al., Arch. Microbiol. 182:277-287 (2004)). The ACD encoded by PAE3250 from hyperthermophilic crenarchaeon Pyrobaculum aerophilum showed the broadest substrate range of all characterized ACDs, reacting with acetyl-CoA, isobutyryl-CoA (preferred substrate) and phenylacetyl-CoA (Brasen et al., supra (2004)). The enzymes from A. fulgidus, H. marismortui and P. aerophilum have all been cloned, functionally expressed, and characterized in E. coli (Musfeldt et al., supra; Brasen et al., supra (2004)).

| Gene | Accession No. | GI No. | Organism |
|---|---|---|---|
| AF1211 | NP_070039.1 | 11498810 | Archaeoglobus fulgidus |
| | | | DSM 4304 |
| scs | YP_135572.1 | 55377722 | Haloarcula marismortui |
| | | | ATCC 43049 |
| PAE3250 | NP_560604.1 | 18313937 | Pyrobaculum aerophilum |
| | | | str. IM2 |

[0695] Production of BDO Utilizing Carboxylic Acid Reductase.

[0696] Described below is the generation of a microbial organism that produces 1,4-butanediol using carboxylic acid reductase enzymes. See corresponding example in WO2013/186402.

[0697] These results show that various carboxylic acid reductases can function in a BDO pathway to produce BDO.

### Example XXIV

### Metabolic Modifications to Improve Engineered Microorganism Characteristics

[0698] This example describes additional metabolic modifications to improve characteristics of an engineered microorganism. Such improved characteristics include, but are not limited to, increased product yield, decreased production of by-products, improved growth characteristics of the engineered microorganisms, including improved characteristics for scale up production, and the like. See corresponding example in WO2013/186402.

[0699] Cultivation Conditions for Bottles.

[0700] Twenty-milliliter bottle cultivations for metabolite production or bioconversion were performed in M9 minimal salts medium (6.78 g/L Na₂HPO₄, 3.0 g/L KH₂PO₄, 0.5 g/L NaCl, 1.0 g/L NH₄Cl, 1 mM MgSO₄, 0.1 mM CaCl₂) supplemented with 10 mM NaHCO₃, 20 g/L D-glucose and 100 mM MOPS to improve the buffering capacity, 10 μg/ml thiamine and the appropriate antibiotics for plasmid maintenance. E. coli strain MG1655 lacIQ+ was grown anaerobically, and anaerobic conditions were obtained by flushing capped anaerobic bottles with nitrogen for at least 5 min. Microaerobic conditions were used for all other strains, which were established by initially flushing capped anaerobic bottles with nitrogen for 5 min, then piercing the septum with a 23G needle (Becton-Dickenson) after inoculation. The needle was kept in the bottle during growth to allow a small amount of air to enter. Protein expression was induced with 0.2 mM IPTG when the culture reached mid-log growth phase, unless otherwise indicated in the text.

[0701] Cultivation Conditions for 96 Well-Plates.

[0702] All the cultures in 96 well-plates were grown in 1.2 ml of M9 medium (composition provided above) with MOPS and appropriate antibiotics. Carbon source in the form of 5% glucose was also added. Microaerobic conditions were obtained by covering the plates with two gas-permeable adhesive seals. The edges of the seal were taped to minimize evaporation. All the cultures were grown at 37° C.

[0703] Bacterial Strains and Plasmids.

[0704] Genomic DNA from bacterial strains was isolated with the PureLink Genomic DNA Mini Kit (Invitrogen) according to the manufacturer's instructions. Recombinant DNA manipulations were conducted as described (Sambrook et al., T. Molecular Cloning: A Laboratory Manual, Cold Spring Harbor Laboratory, Cold Spring Harbor, N.Y., (1989). Genes and open reading frames in the study were amplified from appropriate genomic DNA templates using the high-fidelity KOD DNA polymerase enzyme (EMD Chemicals; Billerica Mass.). Analytical PCR experiments for genotyping and sequencing were conducted according to standard molecular biology protocols with Taq polymerase (Promega). DNA sequencing was provided by Genewiz (South Plainfield N.J.).

[0705] Procedure for Genetic Manipulations. Development of Expression Vectors for BDO Pathway.

[0706] Vector backbones were obtained from Dr. Rolf Lutz of Expressys (expressys.de). The vectors and strains are based on the pZ Expression System described previously (Lutz and Bujard, Nucleic Acids Res. 25:1203-1210 (1997).). Vectors obtained were pZE13luc, pZA33luc, pZS*13luc and pZE22luc and contained the luciferase gene as a stuffer fragment. To replace the luciferase stuffer fragment with a lacZ-alpha fragment flanked by appropriate restriction enzyme sites, the luciferase stuffer fragment was first removed from each vector by digestion with EcoRI and XbaI. The lacZ-alpha fragment was PCR amplified from pUC19 with the following primers:

lacZalpha-RI
(SEQ ID NO: 1)
5′GACGAATTCGCTAGCAAGAGGAGAAGTCGACATGTCCAATTC
ACTGGCCGTCGTTTTAC3′;
lacZalpha 3′BB
(SEQ ID NO: 2)
5′-GACCCTAGGAAGGTTTCTAGAGTCGACCTATGCGGCATCAG
AGCAGA-3′.

[0707] This generated a fragment with a 5′ end of EcoRI site, NheI site, a Ribosomal Binding Site, a SalI site and the start codon. The 3′ end of the fragment contained the stop codon, XbaI, Hindu, and AvrII sites. The PCR product was digested with EcoRI and AvrII and ligated into the base vectors digested with EcoRI and XbaI (XbaI and AvrII have compatible ends and generate a non-site). Because NheI and XbaI restriction enzyme sites generate compatible ends that can be ligated together (but generate a site after ligation that is not digested by either enzyme), the genes cloned into the vectors could be “Biobricked” together (openwetware.org/wiki/Synthetic_Biology:BioBricks). Briefly, this method allows joining an unlimited number of genes into the vector using the same 2 restriction sites, as long as the sites do not appear internal to the genes, because the sites between the genes are destroyed after each addition. Initially, expression was low from these vectors, and they were subsequently modified using the Phusion® Site-Directed Mutagenesis Kit (NEB, Ipswich, Mass.) to insert the spacer sequence AATTAA between the EcoRI and NheI sites. This eliminated a putative stem loop structure in the RNA that bound the RBS and start codon.

[0708] All vectors have the pZ designation followed by letters and numbers indicating the origin of replication, antibiotic resistance marker and promoter/regulatory unit. The origin of replication is the second letter and is denoted by E for ColE1, A for p15A and S for pSC101 (as well as a lower copy number version of pSC101 designated S*)-based origins. The first number represents the antibiotic resistance marker (1 for Ampicillin, 2 for Kanamycin, 3 for Chloramphenicol). The final number defines the promoter that regulated the gene of interest (1 for PLtetO-1, 2 for PLlacO-1 and 3 for PA1lacO-1) and each of these promoters became activated by its corresponding inducer molecule (pLtetO can be induced by tetracycline; pLlacO-1 and pA1lacO-1 can be induced by IPTG). Three base vectors, pZS*13S, pZA33S and pZE13S, were then designed and constructed to serve as “inducible” plasmid vectors.

[0709] In addition to the “inducible” promoters mentioned above, a set of “constitutive” promoters were sampled from the Registry (partsregistry.org). Each of these “constitutive” promoters was then introduced into the pZS*13S vector backbone to replace the pA1lacO-1 inducible promoter via Sequence and Ligation Independent Cloning (SLIC) method described by Li & Eledge (Nature Methods 2007, 4:251-256). Of these sampled “constitutive” promoters (p100, p104, p105, p107, p108, p111, p115 & p119), experiments were carried out to establish an order of promoter strength that was verified by protein expression levels. For these experiments, both “inducible” and “constitutive” plasmid vectors were employed, modified for the biobricks and SLIC insertions as discussed above. To further fine-tune protein expression levels of some overly expressed proteins, ribosomal binding site (RBS) in between promoter and gene coding sequence was modified accordingly using the RBS calculator (salis.psu.edu/software/).

[0710] The SLIC primers used for inserting a list of genes into the pZS*13S vector backbone are listed below. The lower case marks the sequences annealing to a vector backbone while the upper case marks the sequences annealing to the coding region of a gene.

1. ppc 525
Forward SLIC primer:
(SEQ ID NO: 100)
gaggagaagtcgacATGAACGAACAATATTCCGCATTGCG
Reverse SLIC primer:
(SEQ ID NO: 101)
ggaagctttctagaTTAGCCGGTATTACGCATACCTGCC
2. sucAB-lpdA
Forward SLIC primer:
(SEQ ID NO: 102)
taagctagcaagaggagaagtcgacATGCAGAACAGCGCTTTGAAAG
Reverse SLIC primer:
(SEQ ID NO: 103)
gcctctaggaagattctagaTTACTTTTTCTTCGCTTTGGCG
3. galP 1120
Forward SLIC primer:
(SEQ ID NO: 104)
ctagcaagaggagaagtcgacATGCCTGACGCTAAAAAACAGGGGCGGT
Reverse SLIC primer:
(SEQ ID NO: 105)
ctaggaagctttctagagtcgTTAATCGTGAGCGCCTATTTCGCGCAG
4. glk 1123
Forward SLIC primer:
(SEQ ID NO: 106)
ctagcaagaggagaagtcgacATGACAAAGTATGCATTAGTC
GGTGATGTG
Reverse SLIC primer:
(SEQ ID NO: 107)
ctaggaagctttctagagtcgTTACAGAATGTGACCTAAGGT
CTGGCGTAAATG
5. glf 1786
Forward SLIC primer:
(SEQ ID NO: 108)
ctagcaagaggagaagtcgacATGAGTTCTGAAAGTAGTCAG
GGTCTAGTC
Reverse SLIC primers:
(SEQ ID NO: 109)
ctaggaagctttctagagtcgTTACTTCTGGGAGCGCCACATCTC

[0711] For the work discussed below, three base vectors, pZS*13S, pZA33S and pZE13S, modified for the biobricks insertions as discussed above, were employed.

[0712] The following technique describes the construction of the incW plasmids, pPSX13 and and pPSX23R. The original incW plasmid backbone (pPSX) was obtained from Dr. John M. Pemberton (Sarovich and Pemberton, Plasmid 57:306-313 (2007)). The pPSX plasmid was modified to insert either an ampicillin marker (bla gene), designated as pPSX13, into a BamHI restriction enzyme site or an kanamycin marker and a R6k replication origin, designated as pPSX23R, in between BamHI and Sad restriction enzyme sites. Two similar incW plasmids were also constructed to include the ald-adh gene cassette amplified from pZS*13S-ald-adh. For pPSX13-ald-adh ampicillin-resistant plasmid, the bla-ald-adh gene cassette was inserted into a BamHI restriction enzyme site of pPSX13. To construct pPSX23R-ald-adh kanamycin resistant plasmid, the ampicillin marker (bla gene) was replaced with the “kanamycin marker-R6k replication origine” cassette in between XhoI and Sad restriction enzyme sites of pPSX23R.

[0713] The genes 033B, 1210, and 956 were inserted in the mini-F-plasmid backbone pKLJ33S as follows: PCR primers were designed to amplify the genes 033B (033BFOR and 033BREV), 1210C (1210CFOR and 1210CREV), and 956 (956FOR and 956REV) from appropriate templates. These primers included the immediate 5′ (FOR) and 3′ (REV) ends of each gene as denoted in upper case. Each primer also included a tail that was directly homologous to the promoter region (FOR) and terminator region (REV) of plasmid pZA33S. A linear fragment of pZA33S with the promoter region and terminator regions at either extreme end was amplified using Primers pZ-5′ and pZ-3′ and circular pZA33S as a template. The pZA33S linear fragment was combined with each of the 033B, 1210C, and 956 gene fragments and joined using sequence- and ligation-independent cloning to form the corresponding plasmids pZA33S-033B, pZA33S-1210C, and pZA33S-956.

| Primer | | SEQ |
|---|---|---|
| Designation | Primer Sequence | ID NO |
| 033BFOR | tagcaagaggagaagtcgac | 110 |
| | ATGGACTGGAAGAAGATCTA | |
| | TGAAG | |
| 033BREV | cctctaggaagctttctaga | 111 |
| | TTAGAATGCCGCGTTGAAG | |
| 1210CFOR | tagcaagaggagaagtcgac | 112 |
| | ATGAGCTGGCAAGAACTGTA | |
| | TC | |
| 1210CREV | cctctaggaagctttctaga | 113 |
| | TTAATATTTCTCTTTAAAGC | |
| | GCTTTTC | |
| 956FOR | tagcaagaggagaagtcgac | 114 |
| | ATGGCACGTTTTACTTTACC | |
| | AAG | |
| 956REV | cctctaggaagctttctaga | 115 |
| | TTACAAATTAACTTTAGTTC | |
| | CATAGTATGTGC | |
| 034Cmfor | accggtaaacgactcagcag | 116 |
| | cctgacgcactggcgatatt | |
| | attttgccttctcctcacca | |
| | cagaatgttctgccacctga | |
| | CGATATCAAATTACGCCCCG | |
| 034Cmrev | tgcttatccacaacattttg | 117 |
| | cgcacggttatgtggacaaa | |
| | atacctggttacccaggccg | |
| | tgccggcacgttaaccgggc | |
| | CCTAGGTCTAGGGCGGCGGA | |
| | TTTG | |

[0714] Primers 034Cmfor and 034Cmrev were used to amplify the 033B, 1210C, and 956 genes from the appropriate pZA33S plasmid background. These primers were designed to amplify the chloramphenicol resistance gene, pA1 promoter, particular gene of interest, and terminator elements from plasmid pZA33S (with the sequences denoted in upper case) while tail sequences (denoted in lower case) corresponded to regions flanking but not including the ampicillin resistance gene, arabinose responsive promoter and terminator sequences of the mini-F-plasmid pKLJ12 (Jones and Keasling, Biotechnol. Bioengineer 59:659-665 (1998)).

[0715] An E. coli DP10B strain containing plasmid pKLJ12 and temperature-sensitive Red/ET helper plasmid pREDET (Tet) (GeneBridges GmbH, Heidelberg Germany) was inoculated into LB medium containing tetracycline at 10 μg/ml and ampicillin at 100 μg/ml final concentrations and incubated for 3 hours at 30° C. with shaking until cells were turbid. Arabinose to induce expression of the Red/ET recombination functions was added to a final concentration of 0.3%, the temperature was shifted to 37° C. and the cells were allowed to incubate for an additional hour with shaking. After being made electrocompetent by repeated centrifugation and resuspension in ice-cold sterile double-distilled water, these cells were mixed with 034Cmfor/034Cmrev PCR amplifications from the pZA33S-033B, pZA33S-1210C, or pZA33S-956 plasmids in a 1 mm cuvette and then subjected to electroporation at 1800 kV, 25 μF, 200Ω. Electroporated cells were then added to SOC growth medium, incubated at 37° C. without shaking, and then spread on LB solid medium containing chloramphenicol at 10 μg/ml final concentration and incubated at 37° C. for 18 to 24 hours. Resulting chloramphenicol-resistant single colonies were then scored for growth on solid LB media containing either tetracycline at 10 μg/ml or the ampicillin at 100 μg/ml. Colonies that were shown to be chloramphenicol resistant, tetracycline sensitive, and ampicillin sensitive were verified by PCR and DNA sequencing to contain new mini-F-plasmids that had completely exchanged the ampicillin resistance gene/arabinose responsive promoter/terminator of pKLJ12 with the chloramphenicol resistance gene/PA1 promoter/gene-of-interest/terminator of pZA33S by RED/ET-mediated homologous recombination, resulting in the new mini-F-plasmids pKLJ33S-033B, pKLJ33S-1210C, pKLJ33S-956.

[0716] Chromosomal replacement of genes using the sacB gene. The primary method used for the insertion or deletion of genes in the chromosome of E. coli was based on the utilization of the sacB gene from Bacillus subtilis (Gay et al., J. Bacteriol. 153:1424-1431(1983)). The vector used is pRE118 (ATCC87693) deleted of the oriT and IS sequences. The resulting vector (3.6 kb in size and carrying the kanamycin resistance gene) was sequenced and called pRE118-V2. All cloning of fragments was done into the restriction sites KpnI and PstI of pRE118-V2, unless notified. All PCR amplification used genomic DNA from E. coli MG1655 (ATCC47076) as DNA template. The first integration event in the chromosome was selected on LB agar plates containing Kanamycin (25 or 50 mg/L). Correct insertions were verified by PCR using 2 primers: one located outside the region of insertion and one in the kanamycin gene (5′-aggcagttccataggatggc-3′)(SEQ ID NO:118). Clones with the correct insertion were selected for resolution. They were sub-cultured twice in plain liquid LB at the desired temperature and serial dilutions were plated on LB-no salt-sucrose 10% plates. Clones that grew on sucrose containing plates were screened for the loss of the kanamycin resistance gene on LB-low salt agar medium and the deletion/insertion of the fragment of interest was verified by PCR and sequencing of the encompassing region.

[0717] This method was used for deleting appCB using the following primers:

| | | SEQ |
|---|---|---|
| Primer | | ID |
| Designation | Primer Sequence | NO |
| appCB Kpn fw | Ataataataggtaccggcggcg | 119 |
| | ctggcgcagcttgctgcg | |
| appCB BamHI rv | TATTATTATGGATCCAACCCGA | 120 |
| | TAATGGTAGATCTCCCTCT | |
| appCB BamHI fw | Ataataataggatccggagcag | 121 |
| | aaacaatgtggtatttact | |
| appCB Pst rv | TATTATTATCTGCAGATGCTCT | 122 |
| | TTTTTATGCATTACAAACTGC | |

[0718] As a result, the following nucleotides were deleted: 1,036,963->1,039,655

[0719] tesB and ybgC deletions were also made with aforementioned pRE-sacB-Kan vector. The primers used for making the deletion were: (5′-3′)

| Primer | | SEQ |
|---|---|---|
| Designation | Primer Sequence | ID NO |
| tesB-kpn-frw | taataataaggtaccaactgggct | 123 |
| | tgcttcactgg | |
| tesB-bgl-rev | taataataaAGATCTGCCTCGACC | 124 |
| | GTTCAGGAAGG | |
| tesB-bgl-frw | taataataaagatcttaactctcc | 125 |
| | agtaacaaagctgc | |
| tesB-Pst-rev | taataataaCTGCAGGCTATGTCA | 126 |
| | CCACTTACGG | |
| ybgC-Pst-frw | Tattattattcctgcaggcgtctt | 127 |
| | tgttcttccgtcc | |
| ybgC-Kpn-rev | tattattatCTTCGGTACCTTTAG | 128 |
| | CATCTGCTTCGGCC | |
| ybgC-Bam-rev | tattattatGGATCCCGGTAATGC | 129 |
| | AACAAAAGTTAGAGC | |
| ybgC-Bam-frw | tattattatggatccaaagtgact | 130 |
| | gacatgaatatccttgatttgttc | |

[0720] Nucleotides deleted as a consequence were: tesB: 473,525<-474,385; ybgC: 773,975->774,379

[0721] An ndh deletion was also made with the standard pRE-sacB-Kan vector. The primers used for making the deletion were: (5′-3′)

| Primer | | SEQ |
|---|---|---|
| Designation | Primer Sequence | ID NO |
| ndh-Bam-frw | taataataaggatcctacac | 131 |
| | tggcggatgtggcataaac | |
| ndh-Kpn-rev | taataatttggtacccATTC | 132 |
| | ACAGTCACCAGGTACAACG | |
| ndh-Bam-rev | taataataaGGATCCGAGAA | 133 |
| | TAACATGAATGGTGCATTG | |
| ndh-Pst-frw | taataatatctgcagatcca | 134 |
| | caaaaagccctggcaattg | |

[0722] Nucleotides deleted as a result of the deletion were: 1,165,308->1,166,612

[0723] Deletions of yjgB, yqhD, yahK and adhP were introduced with the standard pRE-sacB-Kan vector. The primers used for making the deletion were: (5′-3′)

| Primer | | SEQ |
|---|---|---|
| Designation | Primer Sequence | ID NO |
| ygjB-Pst-frw | gataatcccccctgcagggagcggtaaatag | 135 |
| ygjB-Bam-rev | tattatTTTGGATCCTTCTCTGGTGTTGTTTGGG | 136 |
| yjgB-Bam-frw | tattattatggatccgcgtggtgttgaaagccg | 137 |
| yjgBKpn-rev | tattatAAAGGTACCGCCTCTTCCAGGTCAGTGAAGGG | 138 |
| yqhD-Kpn-frw | taataataaggtacccagttttggctatgccttaag | 139 |
| yqhD-Hind-rev | taataaTCATTAAGCTTGCTCCCTTTGCTGGGCC | 140 |
| yqhD-Hind-frw | taataataataagctttttacgcctcaaactttcg | 141 |
| yqhD-Pst-rev | taataataaATTGCCCTGCAGCGTAAGATTGTCGTTCAGGG | 142 |
| yahK-Kpn-frw | tattattattgtttggtacctctgtgccgct | 143 |
| yahK-Pst-rev | AATGTTCCACTCTGCAGGGATGATAATAAGGGG | 144 |
| yahK-Bam-frw | atcggatccaatcgcacactaacagactg | 145 |
| yahK-Bam-rev | ACAGCTTTGGATCCTCATTGTGTTTACTCCTGATTAGC | 146 |
| adhP XbaI fw | ataataatatctagagcagcaagccgcgcggcaggtggtcag | 147 |
| adhP PstI rv | TATTATTATCTGCAGACGCCATCCTGATCCATATGTATATGG | 148 |
| adhP Bam up rv | TATTATTATGGATCCAGTTCCTCCTTTTCGGATGATGTTCTG | 149 |
| adhP Bam down fw | ataataataggatccgaggcctttgctgcgactgccatgttc | 150 |

[0724] Nucleotides deleted as a result of each of these deletions were: ygjB: 4,493,213<-4,494,232, yqhD: 3,153,377->3,154,540, yahK: 342,108->343,157, adhP: 1,550,852<-1,551,862.

[0725] Gene Deletions Using Lambda-Red Mediated Combination:

[0726] Native genes cyoABCD were deleted from the chromosome by Red-mediated recombination (ncbi nlm nih gov/pubmed/10829079).

[0727] For cyoABCD deletion, the following primers were used to amplify a chloramphenicol or kanamycin resistance gene from pKD3 or pKD4 (ncbi nlm nih.gov/pubmed/10829079), respectively, and were flanked by FRT sites and homologies to cyoABCD:

LK-cyo-F1
(SEQ ID NO: 151)
CGCCACAACCAGTGACACCC
LK-cyo-R1
(SEQ ID NO: 152)
GGGGTTTTAGTCGCCCTTTCTGGC
LK-cyo-IO-down
(SEQ ID NO: 153)
CGGGATCTGGTGGCGTTTAAAGTG
LK-cyo-IO-up
(SEQ ID NO: 154)
TGACGGCGTTTGTCTTCACCG

[0728] E. coli K-12 MG1655 carrying the Red helper plasmid pKD46 was grown in 100 nil LB medium with ampicillin and 1 mM L-arabinose at 30° C. to an OD600 of 0.3, and electroporation-competent cells were prepared as described elsewhere (Sambrook et al., Molecular Cloning: A Laboratory Manual, Cold Spring Harbor Laboratory, Cold Spring Harbor, N.Y., (1989)). A measure of 50 μl of competent cells was mixed with 400 ng of the PCR fragment in an ice-cold 0.1 cm cuvette (Bio-Rad Inc., Hercules, Calif., USA). Cells were electroporated at 1.8 kV with 25 mF and 200, immediately followed by the addition of 1 ml of SOC medium (2% Bacto Tryptone (Difco), 0.5% yeast extract (Difco), 10 mM NaCl, 2.5 mM KCl, 10 mM MgCl₂, 10 mM MgSO₄, 20 mM glucose) with 1 mM L-arabinose. After incubation for 2 h at 37° C., one-tenth portion was spread onto agar plate to select chloramphenicolR or kanamycinR transformants at 37° C. The individual deletions were then transduced into new host strains using P1vir and selecting for the appropriate antibiotic (Silhavy et al., Experiments with gene fusions, Cold Spring Harbor Laboratory, Cold Spring Harbor, N.Y. (1984)). The chloramphenicol or kanamycin resistant colonies were then transformed with the temperature sensitive plasmid pCP20, and plated on ampicillin (100 μg/ml) plates at 30° C. pCP20 contains the yeast Flp recombinase gene, chloramphenicol and ampicillin resistant genes, and temperature sensitive replication. Colonies were grown in LB medium without antibiotics at 42° C. overnight and streak plated on prewarmed LB Agar plates and grown at 42° C. Individual clones were tested for sensitivity to ampicillin and chloramphenicol or kanamycin to isolate clones which had lost the pCP20 plasmid and had the chloramphenicol or kanamycin resistance gene lost via the Flp recombinase. Positive clones with deletions in cyoABCD contain a single FRT “scar” and were verified by PCR using primers which flanked their respective genes.

[0729] The nucleotides deleted because of the cyoABCD deletion were: 449,887->447,270

[0730] The esterase from Yersinia intermedia was integrated in the chromosome with the standard pRed technique described above. The primers used for making the insertion were: (5′-3′)

| Primer | | SEQ |
|---|---|---|
| Designation | Primer Sequence | ID NO |
| JE310 | ACGCTATGGAACTGCAGGATG | 155 |
| | AGAGCATGAAATGGAACGGAT | |
| | GCGCGCCTTAT | |
| JE311 | ACGCTATGGAACTGCAGGATG | 156 |
| | AGAGCATCTGCCCCAGATCTT | |
| | GGCTTTTTGC | |
| JE312 | TTTGAAAACAGGATGTAGCGA | 157 |
| | TGACCGATATTCGCTTGTA | |
| JE312-rv | TACAAGCGAATATCGGTCATC | 158 |
| | GCTACATCCTGTTTTCAAA | |
| JE313 | CGCCTGAATACTACGATTGAC | 159 |
| | TGGAGAATGCGAATGAACA | |
| JE313-rv | TGTTCATTCGCATTCTCCAGT | 160 |
| | CAATCGTAGTATTCAGGCG | |
| JE314 | TTTGAAAACAGGATGTAGCGG | 161 |
| | CCCGTAGTCTGCAAATCC | |
| JE314-rv | GGATTTGCAGACTACGGGCCG | 162 |
| | CTACATCCTGTTTTCAAA | |
| JE315 | GCATTACGCTGACTTGACGGC | 163 |
| | TGGAGAATGCGAATGAACA | |
| JE315-rv | TGTTCATTCGCATTCTCCAGC | 164 |
| | CGTCAAGTCAGCGTAATGC | |

[0731] The sequence that was inserted at the gabD locus (ORF swap) was:

(SEQ ID NO: 165)
ACTGGAGAATGCGAATGAACAGCAATAAAGAGTTAATGCAGCG
CCGCAGTCAGGCGATTCCCCGTGGCGTTGGGCAAATTCACCCG
ATTTTCGCTGACCGCGCGGAAAACTGCCGGGTGTGGGACGTTG
AAGGCCGTGAGTATCTTGATTTCGCGGGCGGGATTGCGGTGCT
CAATACCGGGCACCTGCATCCGAAGGTG.

[0732] Markerless Deletion of sucC and sucD.

[0733] Deletion of the native Escherichia coli sucC (gene 2) and sucD (gene 3) from the chromosome (FIG. 67) was achieved using a two-step double-crossover homologous recombination method. Recombination was catalyzed via expression of the Lambda phage Red genes from pRED-Amp (Gene Bridges, Heidelberg, Germany). Genes encoding levansucrase (gene 6) and kanamycin resistance (gene 7) were integrated into the chromosome, replacing the majority of sucC (gene 2) and sucD (gene 3). Kanamycin was used to select for successful integrants. In a second double-crossover homologous recombination step, the integrated sequence containing the levansucrase gene (gene 6) and kanamycin resistance gene (gene 7) was replaced with an appropriate DNA sequence lacking the majority of sucC (gene 2) and sucD (gene 3), and sucrose resistant clones were selected for.

[0734] Linear double-stranded DNA sequences used in the two homologous recombination steps outlined above were constructed via standard molecular biological techniques. To make the sequence used in the initial integration step, a 1100 bp sequence from within sucB (gene 1) through the 69th base pair of sucC (gene 2) was amplified by PCR from Escherichia coli MG1655 genomic DNA using oligonucleotide 1 and oligonucleotide 3 (FIG. 68a). The genes encoding levansucrase (gene 6) and kanamycin resistance (gene 7) were amplified by PCR from plasmid pRE-118 DNA using oligonucleotide 5 and oligonucleotide 6 (FIG. 68b). Another 1100 bp sequence from the 811th bp of sucD (gene 3), spanning mngR (gene 4) and part of mngA (gene 5) was amplified by PCR from Escherichia coli MG1655 genomic DNA using oligonucleotide 4 and oligonucleotide 2 (FIG. 68a). 20 bp of oligonucleotide 3 overlaps with oligonucleotide 5 and 20 bp of oligonucleotide 6 overlaps with oligonucleotide 4, such that the three overlapping PCR products can be combined and amplified using standard procedures (FIG. 68c). Likewise, the linear double-stranded DNA sequences used in the second recombination for deletion of sucCD was made by combining and amplifying two overlapping PCR products. A 1100 bp sequence from within sucB (gene 1) through the 69th base pair of sucC (gene 2) was amplified by PCR from Escherichia coli MG1655 genomic DNA using oligonucleotide 1 and oligonucleotide 8 (FIG. 68d). Another 1100 bp sequence from the 811th bp of sucD (gene 3), spanning mngR (gene 4) and part of mngA (gene 5) was amplified by PCR from Escherichia coli MG 1655 genomic DNA using oligonucleotide 7 and oligonucleotide 2 (FIG. 68d). Oligonucleotide 7 overlaps with oligonucleotide 8, such that the two overlapping PCR products can be combined and amplified using standard procedures (FIG. 68e). The nucleotides deleted because of the sucCD deletion are from: 762,306->764.120

| Oligo- | | SEQ ID |
|---|---|---|
| nucleotide | | NO |
| 1 | GGCGAAAGAGTCTGCTCCGGC | 166 |
| 2 | CATTCAGACACAACGCATCGCGG | 167 |
| 3 | GGCTTACCAGCACCGGTGGGTTA | 168 |
| | TGCCCGTAGTCTGCAAATCC | |
| 4 | GCATTACGCTGACTTGACGGGTG | 169 |
| | AAAACCGTTCGCAGCCTGG | |
| 5 | GGCTTACCAGCACCGGTGGGTTA | 170 |
| | TGCCCGTAGTCTGCAAATCC | |
| 6 | CCAGGCTGCGAACGGTTTTCACC | 171 |
| | CGTCAAGTCAGCGTAATGC | |
| 7 | GGCTTACCAGCACCGGTGGGTTA | 172 |
| | TGTGAAAACCGTTCGCAGCCTGG | |
| 8 | CCAGGCTGCGAACGGTTTTCACA | 173 |
| | TAACCCACCGGTGCTGGTAAGCC | |

[0735] Analytical Procedures:

[0736] HPLC, LCMS/MS and GCMS were employed for analysis of cell culture and fermentation samples. Good correlation between the two techniques (variation within 10%) provided method cross-validation and ensured data accuracy.

[0737] Organic acids, acetate, pyruvate, lactate and succinate, as well as BDO, were measured by HPLC (Agilent 1100) equipped with diode array and refractive index (RI) detectors, using an ion exclusion Carbomix H-NP5 column (Sepax) with 5 mM sulfuric acid as the mobile phase at 0.6 mL/min flow rate, and 55° C. column temperature. Organic acids were monitored in both UV absorption at 210 nm and refractive index detector, while BDO, ethanol and simple sugars were measured using RI only. All chemicals and reagents were from Sigma-Aldrich (St. Louis, Mo., USA).

[0738] LCMS/MS analysis was performed on API3200 triple quadrupole system (AB Sciex, Life Technologies, Carlsbad, Calif.), interfaced with Agilent 1200 HPLC, utilizing electrospray ionization and MRM based acquisition methods. BDO, 4HB, GBL, Glu, Ala and GABA and internal standards (¹³C isotopically labeled analogs were used for each analyte, respectively, to compensate for the matrix effects and ensure linearity) were monitored in positive ionization mode. Negative ionization was used, when desired, for quantitation of acidic analytes, for example, pyruvate, lactate, succinate and 4HB. Chromatographic separation was conducted on Zorbax Eclipse XDB C18 4.6×30 mm, 1.8 μm particle size, maintaining column at 45° C., flow rate 0.7 mL/min. Injection volume was 5 uL. Eluents consisted of water with 0.1% formic acid and methanol with 0.1% formic acid, analytes of interest eluted under isocratic conditions of 5% methanol followed by the step gradient to 95% methanol, resulting in 2 min long LCMS method. Filtered samples were diluted in water, containing internal standards, dilution factor varied from 200 to 10,000 depending on concentrations of metabolites of interest. Dilution in water of 100-fold of greater resulted in no ion suppression effects observed for media composition and conditions used in 1,4-Butanediol production in E. coli (Yim et al., Nature Chemical Biology 7, 445-452, (2011)). Quantitation dynamic ranges were from 0.05-200 uM for BDO and other analytes. Quantitation was performed using Analyst software. LCMS/MS approach was a preferred method for monitoring BDO, 4HB, GBL, Glu, Ala and GABA due to its fast turnaround time allowing high throughput operation.

[0739] In GCMS approach, BDO, 4HB, lactate and succinate in culture broth samples were derivatized by trimethylsilylation and quantitatively analyzed by GCMS, using a procedure adapted from the literature with some modifications. The developed method demonstrated sensitivity down to low μM level, linearity in 0.05-15 mM range, as well as good reproducibility. 100 μL filtered samples were dried down in a speedvac concentrator for approximately 1 hour at ambient temperature, followed by the addition of 20 μL 10 mM cyclohexanol solution, as an internal standard, in dimethylformamide. 100 μL N,O-bis(trimethylsilyl)triflouro-acetimide (BSTFA) with 1% trimethylchlorosilane was added, and the mixture was incubated at 70° C. for 30 min. The derivatized samples were centrifuged for 5 min and directly injected into GCMS (Agilent 6890N/5973N). An Rtx-5SIL MS capillary column (Restek, 30 m×0.25 mm ID×0.25 μm film thickness) was used. The GC was operated in a split injection mode introducing 1 μL of sample at 20:1 split ratio. The injection port temperature was 250° C. Helium was used as a carrier gas, and the flow rate was maintained at 1.0 mL/min. A temperature gradient program was optimized to ensure good resolution of the analytes of interest and minimum matrix interference. The oven was initially held at 80° C. for 1.5 min, then ramped to 140° C. at 10° C./min and 3 min hold, followed by fast ramping to 300° C. at 100° C./min and final hold for 5 min. The MS interface transfer line was maintained at 280° C. The total analysis time was 17 min including 4 min solvent delay. Standard calibration curves were constructed using analyte solutions in the corresponding cell culture or fermentation medium to match sample matrix as close as possible. Ethanol was assayed by GCMS as well, following sample dilution in methanol, using an HP-InnoWax capillary column (30 m, 0.25 mm ID, 0.25 um film thickness). GCMS data were processed using ChemStation software (Agilent).

[0740] Residual glucose in the fermentation samples was measured using either a YSI instrument or HPLC-UV-RI. Ethanol was measured by either YSI or GCMS.

[0741] The metabolic engineering strategies described herein were applied to increase 1,4-butanediol production in Escherichia coli or otherwise improve characteristics of the engineered microorganisms. The employed 1,4-butanediol pathway for these studies is depicted in FIG. 69. The genes tested for each of the six steps shown in FIG. 69 are described in Tables 22, 26, 28, 30, 34 and 37.

### Example XXV

### Production of 4-Hydroxybutyrate and 1,4-Butanediol Upon Expression of Genes Encoding Alpha-Ketoglutarate Decarboxylase Enzymes

[0742] This example describes production of 4-hydroxybutyrate (4HB or 4hb) and 1,4-butanediol (BDO) in cells engineered to express genes encoding alpha-ketoglutarate decarboxylase enzymes. See corresponding example in WO2013/186402.

[0743] Several heterologous alpha-ketoglutarate decarboxylase genes (Table 22) were expressed in E. coli from the pZS*-13S plasmid to allow a functional pathway from alpha-ketoglutarate to 4-hydroxybutyrate and 1,4-butanediol. Host strains include 3125, 2869, and 3812. These host strains are based on strain ECKh-432 whose construction is described above and in US20110045575. Notable modifications include deletions in adhE, ldhA, pflB, mdh, and arcA. Strain ECKh-432 also contains chromosomally integrated copies of sucD from Porphyromonas gingivalis (encoding CoA-dependant succinate semialdehyde dehydrogenase), sucA from Mycobacterium bovis (encoding alpha-ketoglutarate decarboxylase), 4hbd from P. gingivalis (encoding 4-hydroxybutyrate dehydrogenase), and 4hbd from Clostridium kluyveri (encoding 4-hydroxybutyrate dehydrogenase). For this study, the M. bovis sucA and P. gingivalis sucD genes were deleted in strains 3125, 2869, and 3812. Additionally, strains 3125, 2869, and 3812 each contain a chromosomally integrated copy of 4-hydroxybutyryl-CoA transferase expressed from the pA promoter at the attB locus. Strains 2869 and 3812 were tested with 4-hydroxybutyryl-CoA reductase and 4-hydroxybutyraldehyde reductase expressed from the pPSX23R plasmid. Tables 23, 24, and 25 show that expression of heterologous alpha-ketoglutarate decarboxylase genes enhances 4hb and/or BDO production in strains 3125, 2869, and 3812, respectively, over the controls denoted by “pZS*13S”. Cells were cultured using the 96 well-plate protocol described previously.

TABLE 22
Genes encoding functional alpha-ketoglutarate decarboxylase enzymes.

| Gene | | | |
|---|---|---|---|
| Number | Organism | Accession | GI |
| 42 | Mycobacterium tuberculosis | ZP_06504371.1 | 289744993 |
| 1717 | Mycobacterium smegmatis | YP_889299.1 | 118472055 |
| 1720 | Saccharopolyspora erythraea | YP_001108480.1 | 134102819 |
| 1727 | Jonesia denitrificans | YP_003161752.1 | 256833025 |
| 1715 | Mycobacterium avium subsp. | NP_961470.1 | 41408634 |
| | Paratuberculosis | | |
| 1718 | Nocardia farcinica | YP_120910.2 | 161598437 |
| 1726 | Streptomyces avermitilis | NP_824148.1 | 29829514 |
| 1727 | Jonesia denitrificans | YP_003161752.1 | 256833025 |
| 1913 | Zymomonas mobilis | YP_162422.1 | 56551583 |
| 1914 | Pseudomonas putida | NP_743318.1 | 26987893 |
| 1915 | Mycobacterium avium subsp. | EGO39007.1 | 336460099 |
| | Paratuberculosis | | |
| 1916 | Streptomyces griseus | YP_001827718.1 | 182439999 |
| 1917 | Methanosarcina acetivorans | NP_616881.1 | 20090806 |
| 1918 | Clostridium ljungdahlii | YP_003782019.1 | 300857035 |
| 1920 | Synechocystis sp. PCC 6803 | NP_441304.1 | 16330576 |
| 1921 | Synechococcus sp. PCC 7335 | ZP_05039761.1 | 254426044 |
| 1922 | Clostridium acetobutylicum | NP_350234.1 | 15896885 |
| 1923 | Clostridium carboxidivorans | ZP_05391417.1 | 255524461 |
| | P7 | | |

TABLE 23
BDO and 4-hydroxybutyrate (4HB) production of E. coli host strain 3125
containing several alternative alpha-ketoglutarate decarboxylase plasmid
constructs. The plasmid construct denoted by only “pZS*13S” contains no
alpha-ketoglutarate decarboxylase gene. Plasmid constructs denoted by
pZS*13S followed by a number express the alpha-ketoglutarate
decarboxylase gene denoted by such number.
BDO and 4HB concentrations are in mM.

| | | | LCMS- 19 h | LCMS- 19 h |
|---|---|---|---|---|
| Host strain | Plasmid | OD 19 h | 4HB | BDO |
| 3125 | pZS*13S | 3.61 | 0.208 | 0.327 |
| 3125 | pZS*13S | 2.01 | 0.259 | 0.082 |
| 3125 | pZS*13S | 3.39 | 0.208 | 0.359 |
| 3125 | pZS*13S | 3.38 | 0.178 | 0.352 |
| 3125 | pZS*13S | 3.84 | 0.277 | 0.478 |
| 3125 | pZS*13S | 4.01 | 0.253 | 0.479 |
| 3125 | pZS*13S | 3.88 | 0.283 | 0.422 |
| 3125 | pZS*13S | 3.54 | 0.192 | 0.499 |
| 3125 | pZS*13S-1717 | 4.30 | 17.300 | 1.520 |
| 3125 | pZS*13S-1717 | 3.52 | 17.400 | 1.280 |
| 3125 | pZS*13S-1717 | 3.79 | 17.700 | 1.540 |
| 3125 | pZS*13S-1717 | 3.53 | 17.800 | 1.550 |
| 3125 | pZS*13S-1720 | 2.92 | 3.940 | 0.196 |
| 3125 | pZS*13S-1720 | 1.58 | 2.140 | 0.037 |
| 3125 | pZS*13S-1720 | 1.97 | 2.600 | 0.072 |
| 3125 | pZS*13S-1720 | 3.11 | 3.870 | 0.261 |
| 3125 | pZS*13S-1727 | 12.05 | 2.330 | 0.694 |
| 3125 | pZS*13S-1727 | 3.23 | 3.040 | 1.320 |
| 3125 | pZS*13S-1727 | 3.19 | 3.490 | 1.560 |
| 3125 | pZS*13S-1727 | 4.86 | 2.500 | 0.657 |
| 3125 | pZS*13S-1715 | 3.89 | 14.900 | 1.880 |
| 3125 | pZS*13S-1715 | 4.14 | 15.600 | 1.950 |
| 3125 | pZS*13S-1715 | 4.07 | 15.700 | 1.910 |
| 3125 | pZS*13S-1715 | 3.03 | 14.300 | 1.600 |
| 3125 | pZS*13S-1718 | 2.36 | 4.020 | 0.277 |
| 3125 | pZS*13S-1718 | 1.82 | 4.630 | 0.406 |
| 3125 | pZS*13S-1718 | 2.37 | 3.690 | 0.265 |
| 3125 | pZS*13S-1718 | 2.26 | 3.940 | 0.273 |
| 3125 | pZS*13S-1718 | 2.04 | 4.890 | 0.389 |
| 3125 | pZS*13S-1718 | 2.42 | 4.720 | 0.338 |
| 3125 | pZS*13S-1718 | 2.16 | 4.530 | 0.377 |
| 3125 | pZS*13S-1718 | 2.43 | 5.190 | 0.517 |

TABLE 24
BDO and 4-hydroxybutyrate (4HB) production of E. coli host strain 2869
containing several alternative alpha-ketoglutarate decarboxylase plasmid
constructs. The plasmid construct denoted by only “pZS*13S” contains no
alpha-ketoglutarate decarboxylase gene. Plasmid constructs denoted by
pZS*13S followed by a number express the alpha-ketoglutarate
decarboxylase gene denoted by such number.
BDO and 4HB concentrations are in mM.

| | | | LCMS- 16 h | LCMS- 16 h |
|---|---|---|---|---|
| Host strain | Plasmid | OD 16 h | 4HB | BDO |
| 2869 | pZS*13S | 3.39 | 0.04 | 0.42 |
| 2869 | pZS*13S | 3.41 | 0.04 | 0.42 |
| 2869 | pZS*13S | 3.43 | 0.04 | 0.35 |
| 2869 | pZS*13S | 3.51 | 0.04 | 0.39 |
| 2869 | pZS*13S | 3.51 | 0.03 | 0.39 |
| 2869 | pZS*13S | 3.50 | 0.04 | 0.40 |
| 2869 | pZS*13S | 3.55 | 0.03 | 0.36 |
| 2869 | pZS*13S | 3.50 | 0.02 | 0.35 |
| 2869 | pZS*13S-042 | 3.50 | 0.33 | 2.81 |
| 2869 | pZS*13S-042 | 3.52 | 0.32 | 2.69 |
| 2869 | pZS*13S-042 | 3.58 | 0.32 | 3.05 |
| 2869 | pZS*13S-042 | 3.49 | 0.28 | 2.61 |
| 2869 | pZS*13S-042 | 3.39 | 0.30 | 2.87 |
| 2869 | pZS*13S-042 | 3.41 | 0.28 | 3.06 |
| 2869 | pZS*13S-042 | 3.44 | 0.27 | 2.64 |
| 2869 | pZS*13S-042 | 3.28 | 0.33 | 2.90 |
| 2869 | pZS*13S-1726 | 2.74 | 0.34 | 2.27 |
| 2869 | pZS*13S-1726 | 2.78 | 0.23 | 2.75 |
| 2869 | pZS*13S-1726 | 2.96 | 0.43 | 2.80 |
| 2869 | pZS*13S-1726 | 2.84 | 0.34 | 2.33 |
| 2869 | pZS*13S-1727 | 3.43 | 0.06 | 2.39 |
| 2869 | pZS*13S-1727 | 2.79 | 0.07 | 2.18 |
| 2869 | pZS*13S-1727 | 3.09 | 0.07 | 2.12 |
| 2869 | pZS*13S-1727 | 3.03 | 0.07 | 2.38 |

TABLE 25
BDO and 4-hydroxybutyrate (4HB) production of E. coli host strain 3812
containing several alternative alpha-ketoglutarate decarboxylase plasmid
constructs. The plasmid construct denoted by only “pZS*13S” contains no
alpha-ketoglutarate decarboxylase gene. Plasmid constructs denoted by
pZS*13S followed by a number express the alpha-ketoglutarate
decarboxylase gene denoted by such number.
BDO and 4HB concentrations are in mM.

| | | | LCMS- 24 h | LCMS- 24 h |
|---|---|---|---|---|
| Host strain | Plasmid | OD 24 h | 4HB | BDO |
| 3812 | pZS*13S | 3.75 | 0.07 | 1.71 |
| 3812 | pZS*13S | 3.74 | 0.05 | 1.46 |
| 3812 | pZS*13S | 3.49 | 0.04 | 2.08 |
| 3812 | pZS*13S | 3.59 | 0.05 | 2.31 |
| 3812 | pZS*13S-1913 | 3.40 | 6.51 | 9.25 |
| 3812 | pZS*13S-1913 | 3.28 | 6.46 | 8.69 |
| 3812 | pZS*13S-1913 | 3.41 | 6.22 | 8.53 |
| 3812 | pZS*13S-1913 | 3.25 | 5.94 | 7.89 |
| 3812 | pZS*13S-1914 | 3.83 | 23.10 | 85.00 |
| 3812 | pZS*13S-1914 | 3.41 | 29.70 | 93.10 |
| 3812 | pZS*13S-1914 | 3.68 | 19.90 | 63.10 |
| 3812 | pZS*13S-1914 | 3.45 | 27.20 | 101.00 |
| 3812 | pZS*13S-1915 | 4.17 | 0.30 | 3.28 |
| 3812 | pZS*13S-1915 | 3.78 | 0.18 | 3.11 |
| 3812 | pZS*13S-1915 | 3.95 | 0.14 | 3.08 |
| 3812 | pZS*13S-1915 | 3.97 | 0.11 | 2.80 |
| 3812 | pZS*13S-1916 | 4.09 | 0.07 | 4.82 |
| 3812 | pZS*13S-1916 | 3.69 | 0.12 | 4.54 |
| 3812 | pZS*13S-1916 | 3.86 | 0.09 | 4.73 |
| 3812 | pZS*13S-1916 | 3.82 | 0.08 | 4.89 |
| 3812 | pZS*13S-1917 | 3.61 | 0.08 | 2.70 |
| 3812 | pZS*13S-1917 | 3.99 | 0.06 | 2.92 |
| 3812 | pZS*13S-1917 | 3.59 | 0.12 | 2.74 |
| 3812 | pZS*13S-1917 | 3.57 | 0.11 | 2.64 |
| 3812 | pZS*13S-1918 | 3.10 | 0.25 | 6.43 |
| 3812 | pZS*13S-1918 | 2.93 | 0.34 | 5.94 |
| 3812 | pZS*13S-1918 | 2.98 | 0.23 | 6.48 |
| 3812 | pZS*13S-1918 | 3.03 | 0.23 | 6.53 |
| 3812 | pZS*13S-1920 | 3.30 | 11.20 | 44.10 |
| 3812 | pZS*13S-1920 | 3.57 | 16.60 | 64.20 |
| 3812 | pZS*13S-1920 | 3.71 | 15.00 | 59.10 |
| 3812 | pZS*13S-1920 | 3.55 | 16.30 | 62.40 |
| 3812 | pZS*13S-1921 | 3.99 | 0.23 | 9.07 |
| 3812 | pZS*13S-1921 | 3.70 | 0.24 | 8.76 |
| 3812 | pZS*13S-1921 | 4.01 | 0.24 | 9.79 |
| 3812 | pZS*13S-1921 | 3.88 | 0.27 | 9.35 |
| 3812 | pZS*13S-1922 | 2.46 | 0.06 | 4.00 |
| 3812 | pZS*13S-1922 | 2.79 | 0.23 | 5.55 |
| 3812 | pZS*13S-1922 | 2.61 | 0.23 | 5.25 |
| 3812 | pZS*13S-1922 | 2.93 | 0.18 | 5.53 |
| 3812 | pZS*13S-1923 | 2.82 | 0.25 | 6.46 |
| 3812 | pZS*13S-1923 | 2.48 | 0.22 | 6.43 |
| 3812 | pZS*13S-1923 | 2.69 | 0.17 | 4.42 |
| 3812 | pZS*13S-1923 | 3.18 | 0.18 | 10.50 |

### Example XXVI

### Production of 4HB and BDO Upon Expression of Genes Encoding CoA-Dependant Succinate Semialdehyde Dehydrogenase Enzymes

[0744] This example describes production of 4HB and BDO upon expression of genes encoding CoA-dependant succinate semialdehyde dehydrogenase enzymes. See corresponding example in WO2013/186402.

[0745] Several heterologous CoA-dependant succinate semialdehyde dehydrogenase genes (Table 26) were expressed in E. coli from the pZS*-13S plasmid to allow a functional pathway from succinyl-CoA to 4-hydroxybutyrate and 1,4-butanediol. Host strain 3744 is based on strain ECKh-432 whose construction is described above and in US20110045575. Notable modifications include deletions in adhE, ldhA, pflB, mdh, and arcA. Strain ECKh-432 also contains chromosomally integrated copies of sucD from Porphyromonas gingivalis (encoding CoA-dependant succinate semialdehyde dehydrogenase), sucA from Mycobacterium bovis (encoding alpha-ketoglutarate decarboxylase), 4hbd from P. gingivalis (encoding 4-hydroxybutyrate dehydrogenase), and 4hbd from Clostridium kluyveri (encoding 4-hydroxybutyrate dehydrogenase). For this study, the M. bovis sucA and P. gingivalis sucD genes were deleted in strain 3744. Additionally, strain 3744 contains a chromosomally integrated copy of 4-hydroxybutyryl-CoA transferase expressed from the pA promoter at the attB locus. It also contains a pPSX23R plasmid expressing 4-hydroxybutyryl-CoA reductase and 4-hydroxybutyraldehyde reductase. Table 27 shows that expression of heterologous CoA-dependant succinate semialdehyde dehydrogenase genes enhances 4hb and/or BDO production in strain 3744 over the controls denoted by “pZS*13S”. Cells were cultured using the 96 well-plate protocol described previously.

TABLE 26
Genes Encoding Functional CoA-dependant Succinate
Semialdehyde Dehydrogenase Enzymes

| Gene | | | |
|---|---|---|---|
| Number | Organism | Accession | GI |
| 35 | Porphyromonas gingivalis | NP_904963.1 | 34540484 |
| | W83 | | |
| 49 | Clostridium difficile 630 | YP_001088857.1 | 126699960 |
| 1870 | Metallosphaera sedula | YP_001190808.1 | 146303492 |
| 1871 | Porphyromonas endodontalis | ZP_04389701.1 | 229495977 |
| | ATCC 35406 | | |
| 1872 | Clostridium sporogenes | ZP_02995751.1 | 187779278 |
| 1931 | Porphyromonas | ZP_07821123.1 | 313887434 |
| | asaccharolytica DSM 20707 | | |
| 1932 | Odoribacter splanchnicus | YP_004253242.1 | 325280700 |
| | DSM 20712 | | |

TABLE 27
BDO and 4-hydroxybutyrate (4HB) production of E. coli host strain 3744
containing several alternative CoA-dependant succinate semialdehyde
dehydrogenase plasmid constructs. The plasmid construct denoted by only
“pZS*13S” contains no CoA-dependant succinate semialdehyde
dehydrogenase gene. Plasmid constructs denoted by pZS*13S followed by
a number express the CoA-dependant succinate semialdehyde
dehydrogenase gene denoted by such number.
BDO and 4HB concentrations are in mM.

| | | | LCMS - 16 h | LCMS - 16 h |
|---|---|---|---|---|
| Host strain | Plasmid | OD - 16 h | 4HB | BDO |
| 3744 | pZS*13S | 3.10 | 0.47 | 3.08 |
| 3744 | pZS*13S | 2.97 | 0.54 | 2.69 |
| 3744 | pZS*13S | 3.18 | 0.89 | 4.09 |
| 3744 | pZS*13S | 1.26 | 0.44 | 2.41 |
| 3744 | pZS*13S-035 | 3.63 | 7.29 | 30.80 |
| 3744 | pZS*13S-035 | 2.89 | 6.86 | 28.30 |
| 3744 | pZS*13S-035 | 3.22 | 6.64 | 28.40 |
| 3744 | pZS*13S-035 | 3.73 | 7.55 | 28.80 |
| 3744 | pZS*13S-049 | 1.87 | 10.50 | 23.30 |
| 3744 | pZS*13S-049 | 1.65 | 10.10 | 23.70 |
| 3744 | pZS*13S-049 | 1.87 | 10.80 | 23.60 |
| 3744 | pZS*13S-049 | 1.75 | 11.40 | 23.70 |
| 3744 | pZS*13S-1870 | 3.58 | 0.43 | 7.18 |
| 3744 | pZS*13S-1870 | 3.51 | 0.57 | 7.28 |
| 3744 | pZS*13S-1870 | 3.15 | 0.50 | 5.59 |
| 3744 | pZS*13S-1870 | 2.98 | 0.44 | 6.78 |
| 3744 | pZS*13S-1871 | 3.33 | 6.73 | 37.20 |
| 3744 | pZS*13S-1871 | 3.28 | 6.42 | 31.90 |
| 3744 | pZS*13S-1871 | 3.20 | 7.18 | 32.40 |
| 3744 | pZS*13S-1871 | 3.44 | 7.03 | 33.90 |
| 3744 | pZS*13S-1872 | 3.52 | 0.44 | 4.52 |
| 3744 | pZS*13S-1872 | 3.54 | 0.49 | 4.71 |
| 3744 | pZS*13S-1872 | 3.56 | 0.38 | 4.51 |
| 3744 | pZS*13S-1872 | 3.37 | 0.37 | 4.49 |
| 3744 | pZS*13S-1872 | 3.47 | 0.50 | 4.32 |
| 3744 | pZS*13S-1872 | 3.58 | 0.56 | 4.68 |
| 3744 | pZS*13S-1872 | 3.47 | 0.49 | 4.27 |
| 3744 | pZS*13S-1872 | 3.90 | 0.43 | 4.51 |
| | | OD - 24 hr | LCMS - 24 h | LCMS - 24 h |
| 3744 | pZS*13S | 3.89 | 0.12 | 8.85 |
| 3744 | pZS*13S | 3.79 | 0.17 | 8.57 |
| 3744 | pZS*13S | 3.85 | 0.17 | 8.87 |
| 3744 | pZS*13S | 3.84 | 0.12 | 9.05 |
| 3744 | pZS*13S-1931 | 3.78 | 3.18 | 45.10 |
| 3744 | pZS*13S-1931 | 3.64 | 3.28 | 46.50 |
| 3744 | pZS*13S-1931 | 2.91 | 4.25 | 34.00 |
| 3744 | pZS*13S-1931 | 3.73 | 3.22 | 45.40 |
| 3744 | pZS*13S-1932 | 3.71 | 3.10 | 84.20 |
| 3744 | pZS*13S-1932 | 3.63 | 3.24 | 79.50 |
| 3744 | pZS*13S-1932 | 3.61 | 3.18 | 82.60 |
| 3744 | pZS*13S-1932 | 3.61 | 3.24 | 83.90 |

### Example XXVII

### Production of 4HB and BDO Upon Expression of Genes Encoding 4-hydroxybutyrate Dehydrogenase Enzymes

[0746] This example describes production of 4HB and BDO upon expression of genes encoding 4-hydroxybutyrate dehydrogenase enzymes.

[0747] Several heterologous 4-hydroxybutyrate dehydrogenase genes (Table 28) were expressed in E. coli from the pZS*-13S plasmid to allow a functional pathway from succinyl-CoA and alpha-ketoglutarate to 4-hydroxybutyrate and 1,4-butanediol. Host strain 3891 is based on strain ECKh-432 whose construction is described above and in US20110045575. Notable modifications include deletions in adhE, ldhA, pflB, mdh, and arcA. Strain ECKh-432 also contains chromosomally integrated copies of sucD from Porphyromonas gingivalis (encoding CoA-dependant succinate semialdehyde dehydrogenase), sucA from Mycobacterium bovis (encoding alpha-ketoglutarate decarboxylase), 4hbd from P. gingivalis (encoding 4-hydroxybutyrate dehydrogenase), and 4hbd from Clostridium kluyveri (encoding 4-hydroxybutyrate dehydrogenase). For this study, the P. gingivalis and C. kluyveri 4hbd genes were deleted in strain 3891. Additionally, strain 3891 contains a chromosomally integrated copy of 4-hydroxybutyryl-CoA transferase expressed from the pA promoter at the attB locus. It also contains a pPSX23R plasmid expressing 4-hydroxybutyryl-CoA reductase and 4-hydroxybutyraldehyde reductase. Table 29 shows that expression of heterologous 4-hydroxybutyrate dehydrogenase genes enhances 4hb and/or BDO production in strain 3891 over the controls denoted by “pZS*13S”. Cells were cultured using the 96 well-plate protocol described previously.

TABLE 28
Genes encoding functional 4-hydroxybutyrate dehydrogenase enzymes.

| Gene | | | |
|---|---|---|---|
| Number | Organism | Accession | GI |
| 36 | Porphyromonas gingivalis W83 | NP_904964.1 | 34540485 |
| 150 | Clostridium acetobutylicum ATCC 824 | NP_348201.1 | 15894852 |
| 1879 | Porphyromonas endodontalis ATCC 35406 | ZP_04389726.1 | 229496002 |
| 1880 | Porphyromonas asaccharolytica DSM 20707 | YP_004441566.1 | 332299645 |
| 1881 | Odoribacter splanchnicus DSM 20712 | YP_004253243.1 | 325280701 |
| 1882 | Eubacterium saphenum ATCC 49989 | ZP_05427218.1 | 255994083 |
| 1883 | Clostridium ljungdahlii DSM 13528 | YP_003782020.1 | 300857036 |
| 1884 | Clostridium perfringens ATCC 13124 | YP_694972.1 | 110800333 |
| 1888 | Clostridium difficile 630 | YP_001088853.1 | 126699956 |
| 1889 | Geobacter sulferreducens | NP_952425.1 | 39996474 |
| 1894 | Metallosphaera sedula DSM 5348 (ATCC | YP_001191506.1 | 146304190 |
| | 51363D-5) | | |

TABLE 29
BDO and 4-hydroxybutyrate (4HB) production of E. coli host
strain 3891 containing several alternative 4-hydroxybutyrate
dehydrogenase plasmid constructs. The plasmid construct denoted
by only “pZS*13S” contains no 4-hydroxybutyrate dehydrogenase
gene. Plasmid constructs denoted by pZS*13S followed by a number
express the 4-hydroxybutyrate dehydrogenase gene denoted by such
number. BDO and 4HB concentrations are in mM.

| | | | LCMS - 16 h | LCMS - 16 h |
|---|---|---|---|---|
| Host | Plasmid | OD - 16 h | 4HB | BDO |
| 3891 | pZS*13S | 3.26 | 0.07 | 1.33 |
| 3891 | pZS*13S | 3.06 | 0.04 | 1.38 |
| 3891 | pZS*13S | 3.17 | 0.04 | 1.80 |
| 3891 | pZS*13S | 3.22 | 0.04 | 1.25 |
| 3891 | pZS*13S -036 | 3.11 | 7.19 | 15.90 |
| 3891 | pZS*13S -036 | 2.95 | 7.31 | 17.40 |
| 3891 | pZS*13S -036 | 3.17 | 7.00 | 16.40 |
| 3891 | pZS*13S -036 | 2.80 | 6.84 | 16.60 |
| 3891 | pZS*13S -150 | 2.99 | 2.58 | 31.20 |
| 3891 | pZS*13S -150 | 3.41 | 2.49 | 33.30 |
| 3891 | pZS*13S -150 | 3.11 | 2.88 | 32.40 |
| 3891 | pZS*13S -150 | 2.91 | 2.71 | 33.30 |
| 3891 | pZS*13S -1879 | 3.35 | 1.99 | 9.78 |
| 3891 | pZS*13S -1879 | 3.12 | 2.26 | 10.80 |
| 3891 | pZS*13S -1879 | 3.42 | 2.06 | 9.58 |
| 3891 | pZS*13S -1879 | 3.16 | 2.21 | 10.20 |
| 3891 | pZS*13S -1880 | 2.01 | 3.99 | 13.30 |
| 3891 | pZS*13S -1880 | 2.85 | 4.49 | 14.00 |
| 3891 | pZS*13S -1880 | 2.99 | 4.52 | 12.90 |
| 3891 | pZS*13S -1880 | 2.95 | 4.04 | 12.70 |
| 3891 | pZS*13S -1881 | 3.18 | 3.73 | 7.00 |
| 3891 | pZS*13S -1881 | 2.95 | 3.56 | 7.64 |
| 3891 | pZS*13S -1881 | 3.03 | 3.40 | 6.98 |
| 3891 | pZS*13S -1881 | 2.96 | 3.68 | 7.50 |
| 3891 | pZS*13S -1882 | 3.20 | 3.62 | 22.70 |
| 3891 | pZS*13S -1882 | 3.13 | 3.85 | 24.10 |
| 3891 | pZS*13S -1882 | 3.33 | 3.34 | 22.20 |
| 3891 | pZS*13S -1882 | 2.60 | 3.67 | 19.80 |
| 3891 | pZS*13S -1883 | 3.53 | 2.47 | 24.00 |
| 3891 | pZS*13S -1883 | 3.39 | 1.79 | 24.60 |
| 3891 | pZS*13S -1883 | 3.41 | 2.20 | 27.10 |
| 3891 | pZS*13S -1883 | 3.33 | 2.13 | 22.00 |
| 3891 | pZS*13S -1884 | 3.09 | 1.13 | 30.50 |
| 3891 | pZS*13S -1884 | 3.02 | 1.20 | 33.80 |
| 3891 | pZS*13S -1884 | 3.76 | 1.34 | 34.40 |
| 3891 | pZS*13S -1884 | 3.15 | 1.40 | 36.80 |
| 3891 | pZS*13S -1888 | 3.11 | 0.28 | 31.40 |
| 3891 | pZS*13S -1888 | 3.04 | 0.22 | 30.70 |
| 3891 | pZS*13S -1888 | 3.09 | 0.21 | 29.90 |
| 3891 | pZS*13S -1888 | 3.33 | 0.30 | 31.50 |
| 3891 | pZS*13S -1889 | 3.17 | 1.03 | 19.20 |
| 3891 | pZS*13S -1889 | 3.04 | 1.12 | 18.70 |
| 3891 | pZS*13S -1889 | 3.14 | 1.05 | 17.40 |
| 3891 | pZS*13S -1889 | 3.01 | 1.25 | 18.10 |
| 3891 | pZS*13S -1894 | 3.03 | 0.85 | 13.70 |
| 3891 | pZS*13S -1894 | 2.91 | 0.67 | 13.00 |
| 3891 | pZS*13S -1894 | 3.00 | 1.04 | 12.80 |
| 3891 | pZS*13S -1894 | 3.03 | 0.86 | 12.90 |

### Example XXVIII

### Production of 4HB and BDO Upon Expression of Genes Encoding 4-Hydroxybutyrate Transferase Enzymes

[0748] This example describes production of 4hb and BDO upon expression of genes encoding 4-hydroxybutyrate transferase enzymes.

[0749] Several heterologous 4-hydroxybutyrate transferase genes (Table 30) were expressed in E. coli from either the pZS*-13S or F′ plasmid to allow a functional pathway from alpha-ketoglutarate and succinyl-CoA to 1,4-butanediol. Host strains include 1269, 2731 Δcat2, and 1654. These host strains are based on strain ECKh-432 whose construction is described above and in US20110045575. Notable modifications include deletions in adhE, ldhA, pflB, mdh, and arcA. Strain ECKh-432 also contains chromosomally integrated copies of sucD from Porphyromonas gingivalis (encoding CoA-dependant succinate semialdehyde dehydrogenase), sucA from Mycobacterium bovis (encoding alpha-ketoglutarate decarboxylase), 4hbd from P. gingivalis (encoding 4-hydroxybutyrate dehydrogenase), and 4hbd from Clostridium kluyveri (encoding 4-hydroxybutyrate dehydrogenase). Strains 1269, 2731 Acat2, and 1654 were all tested with 4-hydroxybutyryl-CoA reductase and 4-hydroxybutyraldehyde reductase expressed from the pZS*-13S plasmid. Tables 31, 32, and 33 show that expression of heterologous 4-hydroxybutyrate transferase genes allows BDO production in strains 1269, 2731 Acat2, and 1654, respectively. Cells were cultured using the 96 well-plate protocol described previously.

TABLE 30
Genes encoding functional 4-hydroxybutyrate transferase enzymes.

| Gene | | | |
|---|---|---|---|
| Number | Organism | Accession | GI |
| 34 | Porphyromonas gingivalis | NP_904965 | 34540486 |
| | W83 | | |
| 1210 | Clostridium difficile | YP_001088854 | 126699957 |
| | 630 | | |
| 1769 | Eubacterium saphenum | ZP_05427217 | 255994082 |
| | ATCC 49989 | | |
| 1772 | Porphyromonas endodontalis | ZP_04389695 | 229495971 |
| | ATCC 35406 | | |
| 1774 | Anaerostipes caccae | ZP_02417601 | 167745474 |
| | DSM 14662 | | |
| 33B | Clostridium aminobutyricum | CAB60036 | 188032706 |
| 1801 | Fusobacterium nucleatum | ZP_00144049 | 34763077 |
| | subsp. vincentii ATCC 49256 | | |
| 1803 | Fusobacterium ulcerans | ZP_07928926 | 317064441 |
| | ATCC 49185 | | |
| 1804 | Fusobacterium varium | ZP_08693772 | 340757169 |
| | ATCC 27725 | | |
| 1805 | Odoribacter splanchnicus | YP_004253244 | 325280702 |
| | DSM 20712 | | |
| 1807 | Porphyromonas gingivalis | YP_001930004 | 188995752 |
| 1808 | Fusobacterium | ZP_07914775 | 315918535 |
| | gonidiaformans ATCC 25563 | | |
| 1809 | Acetonema longum | ZP_08623452 | 338811223 |
| | DSM 6540 | | |

[0750] The nucleotide sequences for 1210C and 033B are provided below as these were codon-optimized for expression in E. coli.

33B:
(SEQ ID NO: 174)
atggactggaagaagatctatgaagacagaacctgcactgcagatg
aagcagtaaagagcattaagtcaggtgaccgcgtgctgtttgcgca
ctgtgttgctgaaccgccagttctggtagaagcaatggttgcgaat
gcagctgcatacaagaatgtcacggtttcacacatggttacccttg
gtaagggtgaatactcaaaaccagaatataaagaaaactttacttt
tgaaggttggtttaccagcccttcaacacgtggatccattgcagaa
ggacacggacagtttgtccctgtattcttccacgaggtaccatctt
taatccgtaaagacattttccatgttgatgtattcatggtaatggt
atccccgccagatcataacggtttctgctgtgtgggtgtatcttct
gactataccatgcaggctatcaaatcagcaaaaattgtactggctg
aagtgaatgatcaggtacctgtagtttatggcgatacctttgttca
cgttagtgaaatcgacaagttcgttgaaacttcacatccactgcca
gaaatcggtctgccgaagatcggtgaagtagaagctgctattggta
agcactgcgcttcgctgatcgaagatggttccacattacagcttgg
tatcggcgctattccggatgctgtactttcacagcttaaggacaag
aaacaccttggtatccactctgaaatgatttccgacggtgttgttg
atctttacgaagcaggcgttattgactgcagccaaaagtctatcga
caaaggcaaaatggcaataacattcttaatgggaacgaagcgtctt
tatgatttcgctgcaaacaatccaaaggttgaattaaagccggttg
actacatcaatcatccatctgtagttgcacagtgcagcaaaatggt
ttgcatcaatgcttgatgcaagttgattttatgggtcagattgtct
ccgatagtattggcacaaagcagttctccggcgtaggcggtcaggt
tgacttcgtacgcggtgcatccatgtctattgacggcaaaggtaaa
gcgatcatcgcgatgccttccgttgcaaagaagaaagatggcagta
tgatttcgaagatcgttccattcatcgatcacggtgcagctgtaac
tacatcccgtaacgatgcggactatgtcgtaacggaatatggtatt
gctgaaatgaagggtaagtcgttacaggaccgcgcacgcgcgttaa
tcaatattgcccaccctgatttcaaagatgaattaaaggctgaatt
tgaaaagcgcttcaacgcggcattctaa.
1210C:
(SEQ ID NO: 175)
atgagctggcaagaactgtatcaaagtaaattatgttcagccacag
aagcggtaaaacagattaaaaacggtgataccgtggtatttgccca
ttgtgtaggtgaaccgcctgcactggtggaggcgatgattgaaaat
gctgaacaatataaagatgttgagattaaacatatggttagcctgg
gtagtggtggttatactgcgaaagggatggaagcgcattttcgcgt
aaatccaatgtttgtcagcggcaatgtacgtaaggcgattgaaaat
ggcgatggtgattttacacctgcattcttccatgaagtaccaaagt
tgctgcgtgaaaaacgtctgaaatgtgatgttgttctggcacaggt
aacgccaccagatgaacatggttattgttcgctgggaacaagcgtt
gattatacctatgaagccattaaaaccgcgcgcaccgtaattgttc
aggtgaatgaccagtttcctcgcacctatggtgaggtggtgcatgt
cagcgagtttgactatatcgttgaaaaatcacaaccgctgtttgaa
ctgcaacctgcaaagattggcgaagttgaagaagcgattggtaaaa
attgtgcctcgctgattgaagatggtagcacgttacagctggggat
tggtgggattccggatgcggtgatgttatttctgactgataaaaaa
gatttagggattcatagcgaaatgattagcgatggcacgctggcgc
tttatgaaaaaggtgttattaatggtaaatataaaaattttgataa
agaaaaaatgacggttaccttcctgatgggtactaaaaaactgtat
gactttgccaataataacccggcagtagaggtaaaaccggtagact
atgtgaatcatccggcaattatcatgaaacaacataagatggtttc
tattaatagcgccattcaggttgatttaatggggcaggtggttgca
gaggcgatgggactgcgccaattttccggtgttggcggtcaggttg
actttattcgtggcgtgtcgatgggtgaagatggcaaggcgattat
cgcgatgccttcaatcactacaaaaaaagatggtacggtaattagc
aaaatcgtctctattgtcgatgaaggtgcaccgattaccacctcac
gtaatgatgttgattatattgtcacagaatacggtattgcagaatt
aaaaggcaaatcgctgcgtgaacgcgcacgtaatctgattaatatt
gctcatccatcggtacgtgaatcgctggcagtagaatttgaaaagc
gctttaaagagaaatattaa.

TABLE 31
BDO, GBL, and 4-hydroxybutyrate (4HB) production of E. coli
host strain 1269 containing two alternative 4-hydroxybutyrate
transferase plasmid constructs. The plasmid construct denoted
by only “pZA33S (empty)” contains no 4-hydroxybutyrate
transferase gene. Plasmid constructs denoted by F′ followed by
a number express the 4-hydroxybutyrate transferase gene denoted
by such number. BDO and 4HB concentrations are in mM.

| | | | LCMS- | LCMS- | LCMS- |
|---|---|---|---|---|---|
| Host | | OD | 24 h | 24 h | 24 h |
| Strain | Plasmid | 24 h | 4HB | BDO | GBL |
| 1269 | pZA33S (empty) | 2.92 | 27.60 | 0.00 | 0.00 |
| 1269 | pZA33S (empty) | 2.12 | 23.80 | 0.59 | 0.07 |
| 1269 | pZA33S (empty) | 2.72 | 28.80 | 2.13 | 0.03 |
| 1269 | pZA33S (empty) | 2.32 | 30.50 | 0.14 | 0.00 |
| 1269 | F′34 | 1.76 | 2.42 | 22.20 | 0.87 |
| 1269 | F′34 | 1.70 | 2.34 | 21.00 | 0.88 |
| 1269 | F′34 | 2.09 | 3.23 | 23.50 | 1.21 |
| 1269 | F′34 | 3.83 | 2.77 | 51.30 | 5.01 |
| 1269 | F′1210C | 1.99 | 2.84 | 28.20 | 1.73 |
| 1269 | F′1210C | 1.64 | 2.73 | 27.30 | 1.61 |
| 1269 | F′1210C | 1.89 | 4.28 | 32.30 | 2.59 |
| 1269 | F′1210C | 3.47 | 3.76 | 56.38 | 7.22 |

TABLE 32
BDO, GBL, and 4-hydroxybutyrate (4HB) production of E. coli
host strain 2731 Δcat2 containing alternative 4-hydroxybutyrate
transferase plasmid constructs. Plasmid constructs denoted
by pZS*13S-followed by a number express the 4-hydroxybutyrate
transferase gene denoted by such number. The pZS*13S- backbone
also expresses functional 4-hydroxybutyryl-CoA reductase
and 4-hydroxybutyraldehyde dehydrogenase genes. BDO and
4HB concentrations are in mM.

| | | | LCMS- | LCMS- | LCMS- |
|---|---|---|---|---|---|
| Host | | OD | 19 h | 19 h | 19 h |
| Strain | Plasmid | 19 h | 4HB | BDO | GBL |
| 2731 Δcat2 | pZS*13S-1769 | 3.75 | 1.1 | 24.9 | 0.1 |
| 2731 Δcat2 | pZS*13S-1769 | 3.84 | 1.3 | 23.9 | 0.1 |
| 2731 Δcat2 | pZS*13S-1769 | 4.10 | 1.3 | 23.0 | 0.1 |
| 2731 Δcat2 | pZS*13S-1769 | 4.14 | 1.1 | 27.3 | 0.1 |
| 2731 Δcat2 | pZS*13S-1772 | 4.33 | 2.9 | 36.7 | 0.2 |
| 2731 Δcat2 | pZS*13S-1772 | 4.37 | 2.3 | 37.9 | 0.3 |
| 2731 Δcat2 | pZS*13S-1772 | 4.02 | 2.7 | 40.4 | 0.3 |
| 2731 Δcat2 | pZS*13S-1772 | 3.59 | 3.4 | 27.4 | 0.2 |
| 2731 Δcat2 | pZS*13S-1774 | 4.10 | 2.2 | 29.9 | 0.2 |
| 2731 Δcat2 | pZS*13S-1774 | 3.93 | 1.9 | 29.2 | 0.3 |
| 2731 Δcat2 | pZS*13S-1774 | 4.26 | 2.5 | 31.5 | 0.3 |
| 2731 Δcat2 | pZS*13S-1774 | 4.76 | 1.6 | 29.8 | 0.2 |

TABLE 33
BDO, GBL, and 4-hydroxybutyrate (4HB) production of E. coli
host strain 1654 containing alternative 4-hydroxybutyrate
transferase plasmid constructs. Plasmid constructs denoted
by pZS*13S-followed by a number express the 4-hydroxybutyrate
transferase gene denoted by such number. The pZS*13S- backbone
also expresses functional 4-hydroxybutyryl-CoA reductase
and 4-hydroxybutyraldehyde dehydrogenase genes. BDO and
4HB concentrations are in mM.

| | | | LCMS- | LCMS- | LCMS- |
|---|---|---|---|---|---|
| Host | | OD | 19 h | 19 h | 19 h |
| Strain | Plasmid | 19 h | 4HB | BDO | GBL |
| 1654 | pZS*-13S-033B | 3.96 | 1.47 | 26.00 | 1.69 |
| 1654 | pZS*-13S-033B | 4.17 | 1.32 | 23.90 | 1.54 |
| 1654 | pZS*-13S-033B | 4.11 | 0.99 | 25.80 | 1.62 |
| 1654 | pZS*-13S-033B | 3.80 | 1.04 | 25.40 | 1.61 |
| 1654 | pZS*-13S-1801 | 3.68 | 1.88 | 21.80 | 1.61 |
| 1654 | pZS*-13S-1801 | 3.90 | 1.35 | 21.70 | 1.67 |
| 1654 | pZS*-13S-1801 | 3.76 | 1.76 | 20.90 | 1.55 |
| 1654 | pZS*-13S-1801 | 3.66 | 1.92 | 22.00 | 1.77 |
| 1654 | pZS*-13S-1803 | 3.69 | 1.71 | 27.60 | 1.80 |
| 1654 | pZS*-13S-1803 | 3.79 | 1.45 | 23.60 | 1.63 |
| 1654 | pZS*-13S-1803 | 3.64 | 1.09 | 24.80 | 1.72 |
| 1654 | pZS*-13S-1803 | 3.64 | 1.30 | 23.60 | 1.67 |
| 1654 | pZS*-13S-1804 | 3.74 | 1.27 | 26.00 | 1.83 |
| 1654 | pZS*-13S-1804 | 3.87 | 1.90 | 25.40 | 1.95 |
| 1654 | pZS*-13S-1804 | 4.04 | 1.48 | 22.80 | 1.65 |
| 1654 | pZS*-13S-1804 | 3.75 | 1.87 | 26.00 | 1.87 |
| 1654 | pZS*-13S-1805 | 3.84 | 1.47 | 25.20 | 1.47 |
| 1654 | pZS*-13S-1805 | 3.75 | 1.06 | 27.50 | 1.54 |
| 1654 | pZS*-13S-1805 | 3.08 | 1.67 | 22.00 | 1.26 |
| 1654 | pZS*-13S-1805 | 3.57 | 1.22 | 23.80 | 1.36 |
| 1654 | pZS*-13S-1807 | 3.24 | 0.00 | 4.80 | 0.40 |
| 1654 | pZS*-13S-1807 | 3.30 | 0.29 | 5.10 | 0.48 |
| 1654 | pZS*-13S-1807 | 3.36 | 0.17 | 4.68 | 0.39 |
| 1654 | pZS*-13S-1807 | 3.31 | 0.21 | 5.16 | 0.38 |
| 1654 | pZS*-13S-1808 | 3.38 | 2.39 | 24.50 | 1.20 |
| 1654 | pZS*-13S-1808 | 3.39 | 2.56 | 22.20 | 1.07 |
| 1654 | pZS*-13S-1808 | 3.45 | 2.16 | 22.40 | 1.10 |
| 1654 | pZS*-13S-1808 | 3.42 | 2.26 | 23.10 | 1.27 |
| 1654 | pZS*-13S-1809 | 4.26 | 1.52 | 18.10 | 0.93 |
| 1654 | pZS*-13S-1809 | 4.37 | 1.86 | 21.50 | 1.07 |
| 1654 | pZS*-13S-1809 | 3.51 | 1.67 | 16.00 | 0.81 |
| 1654 | pZS*-13S-1809 | 4.49 | 0.97 | 18.60 | 0.97 |

### Example XXIX

### Production of 4HB and BDO Upon Expression of Genes Encoding 4-Hydroxybutyryl-CoA Reductase Enzymes

[0751] This example describes production of 4hb and BDO upon expression of genes encoding 4-hydroxybutyryl-CoA reductase enzymes.

[0752] Several heterologous 4-hydroxybutyryl-CoA reductase genes (Table 34) were expressed in E. coli from the pZS*-13S plasmid to allow a functional pathway from succinyl-CoA and alpha-ketoglutarate to 1,4-butanediol. Host strain 1889 is based on strain ECKh-432 whose construction is described above and in US20110045575. Notable modifications include deletions in adhE, ldhA, pflB, mdh, and arcA. Strain ECKh-432 also contains chromosomally integrated copies of sucD from Porphyromonas gingivalis (encoding CoA-dependant succinate semialdehyde dehydrogenase), sucA from Mycobacterium bovis (encoding alpha-ketoglutarate decarboxylase), 4hbd from P. gingivalis (encoding 4-hydroxybutyrate dehydrogenase), and 4hbd from Clostridium kluyveri (encoding 4-hydroxybutyrate dehydrogenase). Strain 1889 contains deletions in the native alcohol dehydrogenase genes adhP, yqhD, yahK, and yjgB. Additionally, strain 1889 contains a chromosomally integrated copy of 4-hydroxybutyryl-CoA transferase expressed from the pA promoter at the attB locus. Strain 1889 contains the F′ plasmid expressing a functional 4-hydroxybutyraldehyde reductase gene. Strain 4269 contains a chromosomally integrated copy of a 4-hydroxybutyraldehyde reductase gene at the hemN locus under control of the p119 promoter. Tables 35 and 36 show that expression of heterologous 4-hydroxybutyryl-CoA reductase genes enhances BDO production in strains 1889 and 4269, respectively, over the controls denoted by “pZS*13S”. Cells were cultured using the 96 well-plate protocol described previously.

TABLE 34
Genes encoding functional 4-hydroxybutyryl-
CoAreductase enzymes.

| Gene | | | |
|---|---|---|---|
| Number | Organism | Accession | GI |
| 025B | Clostridium beijerinckii | YP_001310903.1 | 150018649 |
| | NCIMB 8052 | | |
| 733 | Clostridium hylemonae | ZP_03778292.1 | 225569267 |
| | DSM 15053 | | |
| 744 | Clostridium methylpentosum | ZP_03705305.1 | 225016072 |
| | DSM 5476 | | |
| 787 | Eubacterium hallii | ZP_03715465.1 | 225026273 |
| | DSM 3353 | | |
| 865 | Ruminococcus obeum | ZP_01962381.1 | 153809713 |
| | ATCC 29174 | | |
| 778 | Bacillus selenitireducens | YP_003701164.1 | 297585384 |
| | MLS10 | | |
| 714 | Clostridium | AAP42563.1 | 31075383 |
| | saccharoperbutylacetonicum | | |
| | N1-4 | | |
| 707 | Lactobacillus brevis | YP_795711.1 | 116334184 |
| | ATCC 367 | | |
| 141 | Desulfatibacillum | YP_002434126.1 | 218782808 |
| | alkenivorans AK-01 | | |
| 133 | Clostridium phytofermentans | YP_001558295.1 | 160879327 |
| | ISDg | | |
| 715 | Clostridium bolteae | ZP_02089671.1 | 160942363 |
| | ATCC BAA-613 | | |
| 779 | Photobacterium profundum | ZP_01222600.1 | 90414628 |
| | 3TCK | | |
| 145 | Citrobacter koseri | YP_001452373.1 | 157145054 |
| | ATCC BAA-895 | | |
| 704 | Salmonella enterica | NP_460996.1 | 16765381 |
| | typhimurium | | |
| 777 | Sebaldella termitidis | YP_003307836.1 | 269119659 |
| | ATCC 33386 | | |
| 795 | Fusobacterium nucleatum | ZP_04969437.1 | 254302079 |
| | subsp. polymorphum | | |
| | ATCC 10953 | | |
| 706 | Tolumonas auensis | YP_002892893.1 | 237808453 |
| | DSM 9187 | | |
| 137 | Rhodospirillum rubrum | YP_426002.1 | 83592250 |
| | ATCC 11170 | | |
| 1993 | Metalibrary sp | N/A | N/A |

TABLE 35
BDO and 4-hydroxybutyrate (4HB) production of E. coli host
strain 1889 containing several alternative 4-hydroxybutyryl-CoA
reductase plasmid constructs. The plasmid construct denoted
by only “pZS*13S” contains no 4-hydroxybutyryl-CoA reductase
gene. Plasmid constructs denoted by pZS*13S followed by a number
express the 4-hydroxybutyryl-CoA reductase gene denoted by such
number. BDO and 4HB concentrations are in mM.

| | | | LCMS-24 hrs | LCMS-24 hrs |
|---|---|---|---|---|
| Host | Plasmid | OD 24 h | 4HB | BDO |
| 1889 | pZS*13S | 3.12 | 3.93 | 0 |
| 1889 | pZS*13S | 3.68 | 10.4 | 0.5 |
| 1889 | pZS*13S | 2.81 | 2.74 | 0 |
| 1889 | pZS*13S | 2.61 | 1.16 | 0 |
| 1889 | pZS*13S-025B | 3.25 | 0.87 | 8.42 |
| 1889 | pZS*13S-025B | 2.11 | 0.8 | 7.09 |
| 1889 | pZS*13S-025B | 3.01 | 0.65 | 7.38 |
| 1889 | pZS*13S-025B | 3.04 | 0.72 | 6.81 |
| 1889 | pZS*13S-733 | 1.67 | 1.07 | 1.64 |
| 1889 | pZS*13S-733 | 1.63 | 1.22 | 1.87 |
| 1889 | pZS*13S-733 | 2.16 | 1.16 | 1.89 |
| 1889 | pZS*13S-733 | 2.34 | 1.04 | 1.88 |
| 1889 | pZS*13S-744 | 2.75 | 0.63 | 2.17 |
| 1889 | pZS*13S-744 | 3.00 | 0.65 | 1.75 |
| 1889 | pZS*13S-744 | 2.75 | 0.5 | 1.72 |
| 1889 | pZS*13S-744 | 1.98 | 0.39 | 0.56 |
| 1889 | pZS*13S-787 | 2.63 | 0.88 | 1.82 |
| 1889 | pZS*13S-787 | 2.40 | 1 | 1.75 |
| 1889 | pZS*13S-787 | 2.88 | 1.06 | 2.41 |
| 1889 | pZS*13S-787 | 3.26 | 1.03 | 1.86 |
| 1889 | pZS*13S-865 | 2.60 | 0.95 | 1.71 |
| 1889 | pZS*13S-865 | 2.70 | 1.11 | 2.09 |
| 1889 | pZS*13S-865 | 2.69 | 0.98 | 1.4 |
| 1889 | pZS*13S-865 | 2.70 | 1.06 | 1.74 |
| 1889 | pZS*13S-778 | 2.76 | 1.15 | 5.79 |
| 1889 | pZS*13S-778 | 3.12 | 1.06 | 6.48 |
| 1889 | pZS*13S-778 | 2.83 | 1.08 | 4.98 |
| 1889 | pZS*13S-778 | 2.79 | 1.1 | 5.19 |
| 1889 | pZS*13S-714 | 2.60 | 0.63 | 6.55 |
| 1889 | pZS*13S-714 | 2.77 | 0.86 | 6.88 |
| 1889 | pZS*13S-714 | 2.67 | 0.77 | 6.51 |
| 1889 | pZS*13S-714 | 2.73 | 0.75 | 8.12 |
| 1889 | pZS*13S-707 | 1.39 | 0.3 | 1.56 |
| 1889 | pZS*13S-707 | 1.05 | 0.24 | 1.57 |
| 1889 | pZS*13S-707 | 1.99 | 0.26 | 1.62 |
| 1889 | pZS*13S-707 | 2.20 | 0.28 | 1.76 |
| 1889 | pZS*13S-141 | 2.54 | 1.08 | 2.13 |
| 1889 | pZS*13S-141 | 2.72 | 1 | 2.01 |
| 1889 | pZS*13S-141 | 2.54 | 1.04 | 1.9 |
| 1889 | pZS*13S-141 | 2.34 | 0.97 | 1.77 |
| 1889 | pZS*13S-133 | 2.63 | 0.7 | 2.69 |
| 1889 | pZS*13S-133 | 1.79 | 0.73 | 2.5 |
| 1889 | pZS*13S-133 | 3.04 | 0.69 | 2.26 |
| 1889 | pZS*13S-133 | 3.21 | 0.65 | 2.84 |
| 1889 | pZS*13S-715 | 2.79 | 1.03 | 2.31 |
| 1889 | pZS*13S-715 | 2.67 | 1.13 | 1.55 |
| 1889 | pZS*13S-715 | 2.90 | 1.02 | 1.6 |
| 1889 | pZS*13S-715 | 3.10 | 1.17 | 2.26 |
| 1889 | pZS*13S-779 | 3.21 | 8.88 | 0.46 |
| 1889 | pZS*13S-779 | 2.84 | 10.5 | 0.63 |
| 1889 | pZS*13S-779 | 3.98 | 11.9 | 0.84 |
| 1889 | pZS*13S-779 | 4.55 | 13.5 | 1.15 |
| 1889 | pZS*13S-145 | 2.08 | 0.53 | 0.76 |
| 1889 | pZS*13S-145 | 2.65 | 0.66 | 0.72 |
| 1889 | pZS*13S-145 | 2.74 | 0.55 | 0.63 |
| 1889 | pZS*13S-145 | 3.08 | 0.7 | 0.68 |
| 1889 | pZS*13S-704 | 2.49 | 0.93 | 1.65 |
| 1889 | pZS*13S-704 | 2.08 | 0.89 | 1.81 |
| 1889 | pZS*13S-704 | 2.97 | 0.76 | 1.58 |
| 1889 | pZS*13S-704 | 3.35 | 0.9 | 2.32 |
| 1889 | pZS*13S-777 | 2.65 | 1.45 | 0.94 |
| 1889 | pZS*13S-777 | 3.03 | 1.89 | 1.5 |
| 1889 | pZS*13S-777 | 3.36 | 2.16 | 1.79 |
| 1889 | pZS*13S-777 | 3.10 | 1.93 | 1.6 |
| 1889 | pZS*13S-795 | 2.60 | 3.22 | 1.55 |
| 1889 | pZS*13S-795 | 3.43 | 4.54 | 1.96 |
| 1889 | pZS*13S-795 | 3.33 | 4.24 | 1.93 |
| 1889 | pZS*13S-795 | 2.87 | 2.15 | 0.97 |
| 1889 | pZS*13S-706 | 2.67 | 0.96 | 1.36 |
| 1889 | pZS*13S-706 | 2.41 | 1.52 | 2.64 |
| 1889 | pZS*13S-706 | 2.94 | 1.4 | 2.56 |
| 1889 | pZS*13S-706 | 2.71 | 0.85 | 0.89 |
| 1889 | pZS*13S-137 | 2.85 | 1.76 | 1.4 |
| 1889 | pZS*13S-137 | 3.04 | 2.31 | 2.21 |
| 1889 | pZS*13S-137 | 3.00 | 1.89 | 1.56 |
| 1889 | pZS*13S-137 | 2.45 | 0.55 | 0.17 |

TABLE 36
BDO and 4-hydroxybutyrate (4HB) production of
E. coli host strain 4269 containing either no
heterologous4-hydroxybutyryl-CoA reductase gene
(i.e., pZS*13S) or expressing the
4-hydroxybutyryl-CoAreductasegene, 1993, from
the pZS* plasmid under control of the p100
promoter. The gene sequence for 1993 is provided
in the bottom column of the table. BDO and
4HB concentrations are in mM.

| | | | LCMS-24 | LCMS-24 |
|---|---|---|---|---|
| Host | Plasmid | OD 24h | hrs 4HB | hrs BDO |
| 4269 | pZS*13S | 3.12 | 49.3 | 1.9 |
| 4269 | pZS*13S | 3.08 | 50.7 | 1.7 |
| 4269 | pZS*13S | 3.31 | 48.2 | 3.0 |
| 4269 | pZS*13S | 3.18 | 55.7 | 3.2 |
| 4269 | pZS*13S-p100-1993 | 3.88 | 13.1 | 37.2 |
| 4269 | pZS*13S-p100-1993 | 3.58 | 18.3 | 44.3 |
| 4269 | pZS*13S-p100-1993 | 3.40 | 17.3 | 46.9 |
| 4269 | pZS*13S-p100-1993 | 3.40 | 16.0 | 46.5 |

Gene sequence for 1993:
(SEQ ID NO: 176)
atggatttgaagctgaccgatgcggacgttgaggcaatcgtagcgca
agtcatggctaacattgagcgccgtctgggtagcgcggaagcgggca
gcgcagcatccgctgcgtcgccggcaccggctgcgccggttcgtacc
gctccgggtggcagcccggcagccagcccgcgtccggagtacggtgt
ttttgatcgtgcggaggatgcagtcgccgctgccgccgaagctcagg
aagccttcctgcgccagtgtcgtctgcaagaccgtgagcgcattctg
cgtgccatccgtgaagagactctggcacgcaaggaagaattggcacg
cctgatttgggaggaaacgaagctgggtcgcttggaacacaaaattg
caaagctggaattgacggcgctgaaaaccccgggtacggaggatctg
cgcaccgaggcatttagcggcgacaacggcctgaccatcgtcgaaca
tgcgccgtacggtgtgattggcgcggttaccccggttacgaaccctg
cggagactattatcaacaacgcgatcggcatgctggcaagcggtaat
gcagtggtgttcaacgtgcaccctagcgctaaacgttgctccgcgta
taccgtccagatgatcaataaagcagtgatggcagcgggtggtccgc
cgaatctggttacgatggttcgcgagccgaccatggaaaccctgaat
gcgatcatccgcagcccgagcgtgaagctgctggtgggcaccggcgg
tccgggtctggttagcaccctgctgcgctctggtaagaaagcgattg
gtgcgggtgcgggcaatccgccggtcgttgtggatgataccgccgac
ctggagcatgcggcaaaggaaatcatcaaaggcgcgtcctttgacaa
caatattctgtgtattgcggagaaagaggtttttgtggttgataaag
cggccgacggtctgatctatcacatgctggataacggcgcatacatg
ctgggtcgtgacgagctggagaaggtgatgcaattcgcgctgaccgc
ggacgaaagccagggcggtgcgggttgctctattgatccgcgtcgtg
cgtggcatgtgactaaggagtgggtgggcaaagatgcgcgcttgttc
ctggagaagattggtgtcaagactgaccgtccggttgacttgctgtt
gtgcgaggttgactttgaccacccgttcgtgcagctggaacaaatga
tgccagtactgccgattgttcgtgtccgtgacctggatgaagccatc
ggtatggccgtccgtgcggagcacggcaatcgtcacaccgcaattat
gcatagccgtaacgtggacaatctgacccgttttgcccgtgccattg
ccacgaccatcttcgtcaaaaacgcaagcagcttggcgggtgttggt
tatggcggtgaaggttttaccaccatgacgatcgccggtccaacggg
cgagggtctgacgtcggctcgtacgttcacgcgcaaagtccgctgtg
tcctggcggacggcggtttccgtatcgttggttaa

### Example XXX

### Production of 4HB and BDO Upon Expression of Genes Encoding 4-Hydroxybutyraldehyde Reductase Enzymes

[0753] This example describes production of 4hb and BDO upon expression of genes encoding 4-hydroxybutyraldehyde reductase enzymes.

[0754] Several heterologous 4-hydroxybutyraldehyde reductase genes (Table 37) were expressed in E. coli from the pZS*-13S plasmid to allow a functional pathway from succinyl-CoA and alpha-ketoglutarate to 1,4-butanediol. Host strain 1889 is based on strain ECKh-432 whose construction is described above and in US20110045575. Notable modifications include deletions in adhE, ldhA, pflB, mdh, and arcA. Strain ECKh-432 also contains chromosomally integrated copies of sucD from Porphyromonas gingivalis (encoding CoA-dependant succinate semialdehyde dehydrogenase), sucA from Mycobacterium bovis (encoding alpha-ketoglutarate decarboxylase), 4hbd from P. gingivalis (encoding 4-hydroxybutyrate dehydrogenase), and 4hbd from Clostridium kluyveri (encoding 4-hydroxybutyrate dehydrogenase). Strain 1889 contains deletions in the native alcohol dehydrogenase genes adhP, yqhD, yahK, and yjgB. Additionally, strain 1889 contains a chromosomally integrated copy of 4-hydroxybutyryl-CoA transferase expressed from the pA promoter at the attB locus. Table 38 shows that expression of heterologous 4-hydroxybutyraldehyde reductase genes enhances BDO production in strain 1889 over the controls denoted by “pZS*13S”. Cells were cultured using the 96 well-plate protocol described previously.

TABLE 37
Genes encoding functional 4-hydroxybutyraldehyde
reductase enzymes.

| Gene | | | |
|---|---|---|---|
| Number | Organism | Accession | GI |
| 12 | Escherichia coli | AAC76047.1 | 1789386 |
| | K-12 MG1655 | | |
| 956 | Clostridium beijerinckii | YP_001309304.1 | 150017050 |
| | NCIMB 8052 | | |
| 1247 | Clostridium | P13604.1 | 113352 |
| | saccharobutylicum | | |
| 1248 | Clostridium asparagiforme | ZP_03760651.1 | 225405462 |
| | DSM 15981 | | |
| 1250 | Clostridium bolteae | ZP_02083621.1 | 160936248 |
| | ATCC BAA-613 | | |
| 1251 | Clostridium cellulovorans | YP_003845251.1 | 302876618 |
| | 743B | | |
| 1256 | Clostridium hiranonis | ZP_03294286.1 | 210624270 |
| | DSM 13275 | | |
| 1259 | Clostridium methylpentosum | ZP_03705769.1 | 225016577 |
| | DSM 5476 | | |
| 1364 | Atopobium parvulum | YP_003179160.1 | 257783943 |
| | DSM 20469 | | |
| 1365 | Tolumonas auensis | YP_002893476.1 | 237809036 |
| | DSM 9187 | | |
| 1366 | Clostridium carboxidivorans | ZP_05394983.1 | 255528157 |
| | P7 | | |

TABLE 38
BDO and 4-hydroxybutyrate (4HB) production of E. coli host
strain 1889 containing several alternative 4-hydroxybutyraldehyde
reductase plasmid constructs. The plasmid construct denoted
by only “pZS*13S-” contains no 4-hydroxybutyraldehyde
reductase gene but does express a 4-hydroxybutyryl-CoA reductase
gene. Plasmid constructs denoted by pZS*13S-followed by a
number express both 4-hydroxybutyryl-CoA reductase and the
4-hydroxybutyraldehyde reductase gene denoted by such number.
BDO and 4HB concentrations are in mM.

| | | | LCMS- 24 h | LCMS- 24 h |
|---|---|---|---|---|
| Host | Plasmid | OD 24 h | 4HB | BDO |
| 1889 | pZS*13S | 4.68 | 21.5 | 0.4 |
| 1889 | pZS*13S | 4.33 | 15.9 | 0.1 |
| 1889 | pZS*13S | 4.83 | 18.9 | 0.3 |
| 1889 | pZS*13S | 4.25 | 19.8 | 0.6 |
| 1889 | pZS*13S-956 | 4.45 | 2.4 | 52.0 |
| 1889 | pZS*13S-956 | 4.92 | 3.5 | 52.1 |
| 1889 | pZS*13S-956 | 4.65 | 4.2 | 42.9 |
| 1889 | pZS*13S-956 | 5.37 | 4.7 | 54.2 |
| 1889 | pZS*13S-1247 | 4.99 | 2.4 | 46.6 |
| 1889 | pZS*13S-1247 | 5.38 | 2.3 | 42.5 |
| 1889 | pZS*13S-1247 | 5.68 | 2.1 | 38.6 |
| 1889 | pZS*13S-1247 | 5.18 | 2.0 | 40.4 |
| 1889 | pZS*13S-1248 | 4.25 | 2.8 | 17.6 |
| 1889 | pZS*13S-1248 | 4.4 | 1.9 | 17.8 |
| 1889 | pZS*13S-1248 | 3.06 | 2.1 | 17.3 |
| 1889 | pZS*13S-1248 | 4.22 | 2.0 | 19.5 |
| 1889 | pZS*13S-1250 | 4.76 | 0.9 | 30.4 |
| 1889 | pZS*13S-1250 | 5.05 | 1.0 | 30.9 |
| 1889 | pZS*13S-1250 | 4.67 | 1.1 | 28.5 |
| 1889 | pZS*13S-1250 | 5.57 | 1.1 | 33.5 |
| 1889 | pZS*13S-1251 | 4.68 | 2.0 | 49.9 |
| 1889 | pZS*13S-1251 | 4.65 | 2.0 | 45.3 |
| 1889 | pZS*13S-1251 | 4.86 | 1.7 | 42.6 |
| 1889 | pZS*13S-1251 | 4.76 | 1.9 | 42.7 |
| 1889 | pZS*13S-1256 | 4.63 | 15.7 | 11.9 |
| 1889 | pZS*13S-1256 | 4.48 | 16.2 | 12.6 |
| 1889 | pZS*13S-1256 | 5.1 | 15.0 | 12.8 |
| 1889 | pZS*13S-1256 | 5.51 | 15.3 | 13.4 |
| 1889 | pZS*13S-1259 | 5.01 | 1.0 | 33.7 |
| 1889 | pZS*13S-1259 | 5.29 | 1.1 | 28.9 |
| 1889 | pZS*13S-1259 | 5.49 | 1.3 | 29.5 |
| 1889 | pZS*13S-1259 | 5.25 | 1.2 | 31.5 |
| 1889 | pZS*13S-1364 | 5.52 | 5.0 | 48.8 |
| 1889 | pZS*13S-1364 | 5.12 | 8.3 | 47.7 |
| 1889 | pZS*13S-1364 | 5.47 | 7.1 | 42.2 |
| 1889 | pZS*13S-1364 | 5.48 | 7.8 | 46.0 |
| 1889 | pZS*13S-1365 | 5.49 | 1.1 | 33.1 |
| 1889 | pZS*13S-1365 | 5.65 | 0.7 | 37.7 |
| 1889 | pZS*13S-1365 | 6.08 | 1.1 | 34.8 |
| 1889 | pZS*13S-1365 | 5.5 | 0.9 | 28.6 |
| 1889 | pZS*13S-1366 | 5.13 | 2.2 | 52.6 |
| 1889 | pZS*13S-1366 | 4.76 | 2.4 | 56.1 |
| 1889 | pZS*13S-1366 | 4.93 | 2.2 | 56.9 |
| 1889 | pZS*13S-1366 | blank | 2.5 | 57.9 |

[0755] In the examples below, additional genetic manipulations are described that were made in the host strain to improve the yield of BDO on glucose. The key genes for deletion and overexpression are shown in FIG. 70.

[0756] Starting from the TCA cycle intermediate, alpha-ketoglutarate (AKG), there are two ways to channel flux into the BDO pathway. The first one comprises of an α-ketoacid decarboxylase that decarboxylates AKG into succinate semialdehyde and subsequently reduces it to 4-hydroxybutyrate (4HB). An alternative way to get to 4HB is via AKG dehydrogenase which transforms AKG into succinyl-CoA. This is then reduced to succinate semialdehye via succinate semialdehdye dehydrogenase and then to 4HB. 4HB can then be activated to 4-hydroxybutyryl-CoA (4-HBCoA) via a transferase that transfers the CoA from acetyl-CoA. 4-HBCoA is reduced to 4-hydroxybutyraldehyde via an aldehyde dehydrogenase (ALD). The aldehyde is finally reduced to 1,4-butanediol (BDO) using an alcohol dehydrogenase (ADH).

### Example XXXI

### Overexpression of Phosphoenolpyruvate Carboxylase

[0757] This example describes overexpression of phosphoenolpyruvate (PEP) carboxylase. See corresponding example in WO2013/186402.

[0758] ppc refers to a gene that encodes for phosphoenolpyruvate (PEP) carboxylase activity. The net reaction involves the conversion of PEP and bicarbonate into oxaloacetate and phosphate. The overexpression of PEP carboxylase leads to conversion of more phosphoenolpyruvate (PEP) into OAA, thus reducing the flux from PEP into pyruvate and subsequently into acetyl-CoA. This leads to increased flux into the TCA cycle and thus into the pathway. Further, this overexpression also decreases the intracellular acetyl-CoA pools available for the ethanol-forming enzymes to work with, thus reducing the formation of ethanol and acetate. The increased flux towards oxaloacetate also helps reduce pyruvate and alanine secretion. Additionally, increased availability of oxaloacetate can reduce the cellular needs for respiration and also the amount of carbon lost as CO₂. The gene ppc was cloned on the plasmid pZS*-13S as described above.

[0759] Table 39 shows the BDO production in 96-well plates from the strain 3162 from 4 replicates. The gene ppc (#525) was overexpressed on pZS* with a pA promoter as described before and an RBK variant 5K was created. Host strain 3162 is based on strain ECKh-432 whose construction is described above and in US20110045575. Notable modifications include deletions in adhE, ldhA, pflB, mdh, and arcA. Strain ECKh-432 also contains chromosomally integrated copies of sucD from Porphyromonas gingivalis (encoding CoA-dependant succinate semialdehyde dehydrogenase), sucA from Mycobacterium bovis (encoding alpha-ketoglutarate decarboxylase), 4hbd from P. gingivalis (encoding 4-hydroxybutyrate dehydrogenase), and 4hbd from Clostridium kluyveri (encoding 4-hydroxybutyrate dehydrogenase). Strain 3162 contains deletions in the native alcohol dehydrogenase genes adhP, yqhD, yahK, and yjgB. Additionally, strain 3162 contains a chromosomally integrated copy of 4-hydroxybutyryl-CoA transferase expressed from the pA promoter at the attB locus. It also has deletions of cytochrome oxidases, cyoABCD and appBC. The aldehyde dehydrogenase and alcohol dehydrogenase genes for converting 4-hydroxybutyryl-CoA into 4-hydoxybutyraldehyde and subsequently to 1,4-butanediol (BDO) are expressed on the pPSX23R plasmid. The gene candidates for these enzyme steps have already been described. FIG. 71 shows the average BDO and 4HB for the culture and compares it to 4 replicates from the control strain 3162. The same comparison is made in FIG. 72 for the ethanol numbers. Higher BDO and 4HB were observed in cells with ppc overexpressed. As expected, lower ethanol numbers were seen.

TABLE 39
BDO, 4-hydroxybutyrate (4HB) and ethanol data for four
4HB-producing replicates that had the gene ppc overexpressed
on pZS* after 24 hours of culture time in 96-well plates.
The top 4 rows show the replicate data for the control
cultures. All the concentrations are in mM.

| Host | Plasmid #1 | OD | 4HB | BDO | EtOH |
|---|---|---|---|---|---|
| 3162 | pZS*13S | 3.08 | 5.16 | 23.3 | 2.11 |
| 3162 | pZS*13S | 2.96 | 5.23 | 24.5 | 2.27 |
| 3162 | pZS*13S | 2.76 | 4.98 | 25.2 | 2.23 |
| 3162 | pZS*13S | 3.05 | 6.02 | 26 | 2.3 |
| 3162 | pZS*13S-(5k)525 | 3.02 | 9.18 | 29.9 | 1.59 |
| 3162 | pZS*13S-(5k)525 | 2.50 | 9.32 | 28.8 | 1.47 |
| 3162 | pZS*13S-(5k)525 | 3.24 | 9.3 | 28 | 1.49 |
| 3162 | pZS*13S-(5k)525 | 3.38 | 24.5 | 0.72 | 0.69 |

### Example XXXII

### Overexpression of Alpha-Ketoglutarate Dehydrogenase

[0760] This example describes overexpression of alpha-ketoglutarate dehydrogenase. See corresponding example in WO2013/186402.

[0761] This enzyme complex is formed by sucA, sucB and lpdA in Escherichia coli. It converts alpha-ketoglutarate into succinyl-CoA that is subsequently channeled into the BDO pathway. A limitation in this pathway, including any limitation in the capacity of alpha-ketoglutarate dehydrogenase, can lead to the formation of glutamate via, for example, glutamate dehydrogenase (gdhA). This leads to a carbon loss and reduction in yield. Expressing an extra copy of sucAB and lpdA in the BDO-producing strain helped reduce glutamate by significant levels. It can also pull flux through the TCA cycle and help reduce other C2 (ethanol and acetate) and C3 byproducts (alanine, pyruvate). sucAB and lpdA were cloned on pZS* plasmid under the pA promoter as described above. ALD and ADH required for BDO production were expressed on pPSX23R as described earlier.

[0762] Table 40 shows the 4HB and BDO production in 96-well plates from 4 replicates of strain 3933 after 24 hours of culture time. Host strain 3933 is based on strain ECKh-432 whose construction is described above and in US20110045575. Notable modifications include deletions in adhE, ldhA, pflB, mdh, and arcA. Strain ECKh-432 also contains chromosomally integrated copies of sucD from Porphyromonas gingivalis (encoding CoA-dependant succinate semialdehyde dehydrogenase), sucA from Mycobacterium bovis (encoding alpha-ketoglutarate decarboxylase), 4hbd from P. gingivalis (encoding 4-hydroxybutyrate dehydrogenase), and 4hbd from Clostridium kluyveri (encoding 4-hydroxybutyrate dehydrogenase). It contains deletions in the native alcohol dehydrogenase genes adhP, yqhD, yahK, and yjgB. The strain contains a chromosomally integrated copy of 4-hydroxybutyryl-CoA transferase expressed from the pA promoter at the attB locus. It also has deletions of cytochrome oxidases, cyoABCD and appBC, and adh is integrated on the chromosome under the promoter p119 at the hemN locus.

TABLE 40
BDO, 4HB and ethanol data for four 4HB producing replicates of
strain 3933 that had the genes sucAB-lpdA overexpressed on a plasmid.
The bottom 4 rows show the replicate data for the control cultures of
the host strain 3933. All the concentrations are in mM and were
measured after 24 hours of culture time in 96-well plates. 1438
refers to the native sucA gene (b0726), 1439 refers to the native
wild type sucB gene (b0727), the last gene in the biobrick on pZS*
is mutant version of lpdA (b0116) described previously in Example
XIV. This gene is a subunit of the pyruvate dehydrogenase complex
in Escherichia coli and has been modified such that pyruvate
dehydrogenase is not inhibited by NADH. The mutations were made as
described in Yim et al., Nature Chemical Biology 7: 445-452 (2011)).

| Host | plasmid_1 | OD | 4HB | BDO | Glutamate |
|---|---|---|---|---|---|
| 3933 | pZS*13S_1438-1439- | 2.91 | 6.27 | 35.00 | 0.03 |
| | 160D345K-lpdA-KP | | | | |
| 3933 | pZS*13S_1438-1439- | 2.89 | 6.37 | 33.50 | 0.03 |
| | 160D345K-lpdA-KP | | | | |
| 3933 | pZS*13S_1438-1439- | 2.94 | 6.52 | 32.40 | 0.04 |
| | 160D345K-lpdA-KP | | | | |
| 3933 | pZS*13S_1438-1439- | 2.96 | 5.76 | 31.10 | 0.04 |
| | 160D345K-lpdA-KP | | | | |
| 3933 | pZS*13S | 3.06 | 6.44 | 38.30 | 2.68 |
| 3933 | pZS*13S | 3.05 | 5.42 | 36.40 | 2.20 |
| 3933 | pZS*13S | 3.22 | 5.36 | 36.40 | 2.21 |
| 3933 | pZS*13S | 3.12 | 4.95 | 35.00 | 2.08 |

[0763] FIG. 73 shows the average BDO and 4HB numbers from four replicates of a 4HB producing host strain that had the genes sucAB and mutant lpdA overexpressed on pZS*compared with the corresponding averages from four replicates of the control strain. ALD and ADH were expressed on the plasmid pPZSX23R. FIG. 74 shows the reduction in the average glutamate numbers from the four replicates of the strain that had the genes sucAB and mutant lpdA overexpressed on pZS* and compared with those from the control. These results show that expression of sucAB resulted in a dramatic reduction in the amount of glutamate produced and did not adversely affect the production of BDO or 4HB.

### Example XXXIII

### Overexpression of a Non-Phosphotransferase Sugar Uptake System

[0764] This example describes overexpression of glucokinase, galP and or glf as representatives of a non-phosphotransferase (PTS) sugar uptake system. See corresponding example in WO2013/186402.

[0765] The primary mode of glucose uptake in the host strains is the PTS system. Every molecule of glucose converted into glucose-6-phosphate (G6P) via this system is accompanied by the conversion of one molecule of PEP into pyruvate. Note that PEP is converted into oxaloacetate via PEP carboxylase in the strains. Additionally, PEP is also converted into pyruvate (by the PTS system as well as pyruvate kinase) and subsequently into acetyl-CoA by pyruvate dehydrogenase in the strains. The BDO pathway requires equimolar amounts of oxaloacetate and acetyl-CoA for forming each mole of BDO. The fixed stoichiometry associated with the PTS system disturbs this balance, leading to higher ratios of acetyl-CoA relative to oxaloacetate. This then leads to production of ethanol and acetate in the cells. The overexpression of non-PTS mode of sugar uptake helps alleviate this issue and balance the amount of oxaloacetate available in comparison to acetyl-CoA, thus increasing flux through the BDO pathway, reducing the C2 byproducts, acetate and ethanol, and reducing the C3 byproducts, pyruvate and alanine.

[0766] The primary mechanism of non-PTS glucose uptake is via a permease such as galP to import the sugar and then its ATP-dependent phosphorylation via the kinase encoded by glk. An alternate way to uptake glucose is via the glucose facilitator, glf. While E. coli does not have this facilitator, one was cloned from Zymomonas mobilis and introduced into E. coli (Parker et al. Mol Microbiol. 15(5):795-802 (1995)).

### Example XXXIV

### Expression of Gamma-Butyrolactone Esterase

[0767] This example describes expression of a gamma-butyrolactone esterase. See corresponding example in WO2013/186402.

[0768] Gamma-butyrolactone (GBL) is a byproduct formed during the fermentation of sugars to 1,4-butanediol (BDO). It is formed from the unstable pathway intermediate 4-hydroxybutyryl-CoA. To a small extent, it can also formed by spontaneous lactonization of 4-hydroxybutyrate.

[0769] Hydroxyacids and their corresponding lactones exist in pH-dependent equilibrium with each other. Lactonization is acid-catalyzed and favorable at low pH. Under alkaline conditions the equilibrium is driven to the open-chain hydroxycarboxylate anion. At the cytoplasmic pH, typically 7.4, hydrolysis of the GBL lactone is favored (FIG. 75). The hydrolysis of GBL to 4-HB can be accelerated in the presence of an enzyme with GBL esterase activity, thus improving the yield and eliminating a byproduct that can complicate downstream separations of the product.

[0770] Esterases from Yersinia intermedia 29909 and Agrobacterium tumefaciens str. C58 (Carlier et al., Mol. Plant Microbe Interact. 17(9):951-957 (2004)) were identified and selected as exemplary esterase genes. The nucleotide sequence of the Yersinia gene (locus yinte0001_{—}13710) is shown in FIG. 89 (see also GenBank ZP_{—}04636075.1; GI:238792441). The nucleotide sequence of the gene from Agrobacterium tumefaciens is shown in FIG. 90. The gene can also be designated ahlK. Additionally exemplary esterases include AttM of Escherichia coli Kth10 (GenBank ZP_{—}19612688.1, GI:432369596) and attM of Photorhabdus asymbiotica (GenBank YP_{—}003039319.1 GI:253987963).

[0771] Table 41 shows BDO, 4HB and GBL data from 96 well-plates of four replicates of a strain that had the esterase integrated (Strain 2387) and compared with the control with no esterase (strain 2237). Host strain 2237 is based on strain ECKh-432 whose construction is described above and in US20110045575. Notable modifications include deletions in adhE, ldhA, pflB, mdh, and arcA. Strain ECKh-432 also contains chromosomally integrated copies of sucD from Porphyromonas gingivalis (encoding CoA-dependant succinate semialdehyde dehydrogenase), sucA from Mycobacterium bovis (encoding alpha-ketoglutarate decarboxylase), 4hbd from P. gingivalis (encoding 4-hydroxybutyrate dehydrogenase), and 4hbd from Clostridium kluyveri (encoding 4-hydroxybutyrate dehydrogenase). Strain 2237 contains deletions in the native alcohol dehydrogenase genes adhP, yqhD, yahK, and yjgB. It also contains a chromosomally integrated copy of 4-hydroxybutyryl-CoA transferase expressed from the pA promoter at the attB locus. An additional deletion in poxB was also introduced.

TABLE 41
BDO, 4HB and GBL data from 96 well-plates of four replicates of a
strain that had the esterase integrated (Strain 2387) and compared
with the control with no esterase (strain 2237). All concentrations
are in mM and were measured after 19 hours of culture time.

| Host | OD | 4HB | BDO | GBL |
|---|---|---|---|---|
| 2237 | 3.56 | 2.50 | 27.70 | 4.54 |
| 2237 | 3.43 | 2.54 | 32.20 | 5.00 |
| 2237 | 3.37 | 2.44 | 27.10 | 4.34 |
| 2237 | 3.54 | 2.19 | 22.60 | 3.26 |
| 2387 | 3.80 | 0.00 | 23.60 | 0.00 |
| 2387 | 3.87 | 2.59 | 24.70 | 0.65 |
| 2387 | 4.00 | 2.62 | 27.70 | 0.59 |
| 2387 | 4.30 | 3.20 | 29.00 | 0.68 |

[0772] FIG. 76 shows the average BDO and 4HB numbers from four replicates of a host strain capable of producing 4-hydrobutyryl-CoA that had the esterase integrated (2387) compared with the corresponding averages from four replicates of the control strain (2237). FIG. 77 shows the average GBL numbers from four replicates of a host strain that had the esterase integrated (2387) compared with the corresponding averages from four replicates of the control strain (2237). Lower GBL was observed with the strains that had the esterase integrated. These results demonstrate expression of an enzyme having gamma-butyrolactone esterase activity without adversely affecting production of BDO or 4HB.

### Example XXXV

### Deletion of Succinyl-CoA Synthetase

[0773] This example describes deletion of succinyl-CoA synthetase. See corresponding example in WO2013/186402.

[0774] Succinyl-CoA synthetase is encoded by sucCD in Escherichia coli. The deletion of arcA highly upregulates the expression of these genes (and the entire sdh-suc operon) in the cells. Repeated rounds of flux through the TCA cycle leads to carbon loss as CO₂. The deletion of sucCD blocked the TCA cycle downstream of succinyl-CoA, reducing the CO₂ losses by ˜70% and leading to a corresponding increase in BDO titers and yields.

[0775] The deletion of sucCD was introduced in host strain 4070. This strain is based on strain ECKh-432 whose construction is described above and in US20110045575. Notable modifications include deletions in adhE, ldhA, pflB, mdh, and arcA. Strain ECKh-432 also contains chromosomally integrated copies of sucD from Porphyromonas gingivalis (encoding CoA-dependant succinate semialdehyde dehydrogenase), sucA from Mycobacterium bovis (encoding alpha-ketoglutarate decarboxylase), 4hbd from P. gingivalis (encoding 4-hydroxybutyrate dehydrogenase), and 4hbd from Clostridium kluyveri (encoding 4-hydroxybutyrate dehydrogenase). Strain 4070 contains deletions in the native alcohol dehydrogenase genes adhP, yqhD, yahK, and yjgB. Additionally, this strain contains a chromosomally integrated copy of 4-hydroxybutyryl-CoA transferase expressed from the p119 promoter at the attB locus. It also has deletions of cytochrome oxidases, cyoABCD and appBC. The adh was integrated on the chromosome under the promoter p119 at the hemN locus.

TABLE 42
BDO and 4HB data from 96 well-plates of four replicates of a 4-HB
producing strain that had the sucCD genes deleted (Strain 4269) compared
with the no deletion control (strain 4070). Higher 4HB was observed
with strains that had the sucCD deleted. All concentrations are in
mM and were measured after 24 hours of culture time.

| Host | OD | 4HB | BDO |
|---|---|---|---|
| 4070 | 3.62 | 0.289 | 37.2 |
| 4070 | 3.58 | 0.777 | 41.4 |
| 4070 | 3.33 | 0.377 | 28.5 |
| 4070 | 3.75 | 0.792 | 54.4 |
| 4269 | 2.95 | 8.93 | 50.5 |
| 4269 | 2.68 | 8.07 | 50.5 |
| 4269 | 3.34 | 8.65 | 50.1 |
| 4269 | 2.94 | 8.55 | 51.8 |

| Host | plasmid_1 | OD | 4HB | BDO |
|---|---|---|---|---|
| 4070 | pZS*13S-p100-ALD | 3.62 | 0.289 | 37.2 |
| 4070 | pZS*3S-p100-ALD | 3.58 | 0.777 | 41.4 |
| 4070 | pZS*13S-p100-ALD | 3.33 | 0.377 | 28.5 |
| 4070 | pZS*13S-p100-ALD | 3.75 | 0.792 | 54.4 |
| 4269 | pZS*13S-p100-ALD | 2.95 | 8.93 | 50.5 |
| 4269 | pZS*13S-p100-ALD | 2.68 | 8.07 | 50.5 |
| 4269 | pZS*13S-p100-ALD | 3.34 | 8.65 | 50.1 |
| 4269 | pZS*13S-p100-ALD | 2.94 | 8.55 | 51.8 |

[0776] FIG. 78 shows the average BDO and 4HB numbers from four replicates of a host strain that had the genes sucCD deleted (4269) compared with the corresponding averages from four replicates of the control strain (4070). These results demonstrate increased yield of BDO and 4HB with the deletion of sucCD.

### Example XXXVI

### Deletion of Acyl CoenzymeA Thioesterases

[0777] This example describes deletion of acyl coenzymeA thioesterases ybgC and tesB. See corresponding example in WO2013/186402.

[0778] One of the intermediates in the BDO pathway is 4-hydroxybutyryl-CoA. This compound can spontaneously or enzymatically get cyclized to form GBL (gamma-butyryl-lactone). E. coli possesses some reversible CoA thioesterases reported to have broad substrate specificity on CoA substrates of C4 to C6 groups. The deletion of these gene candidates eliminated approximately 50% of the GBL formation via the pathway. Such activities can be found analogously in other organisms.

[0779] The deletions of tesB and ybgC were made in host strain 1136. This strain is based on strain ECKh-432 whose construction is described above and in US20110045575. Notable modifications include deletions in adhE, ldhA, pf1B, mdh, and arcA. Strain ECKh-432 also contains chromosomally integrated copies of sucD from Porphyromonas gingivalis (encoding CoA-dependant succinate semialdehyde dehydrogenase), sucA from Mycobacterium bovis (encoding alpha-ketoglutarate decarboxylase), 4hbd from P. gingivalis (encoding 4-hydroxybutyrate dehydrogenase), and 4hbd from Clostridium kluyveri (encoding 4-hydroxybutyrate dehydrogenase). Strain 1136 has additional deletions in ndh (NADH dehydrogenase II) and succinate semialdehvde dehydrogenase encoding genes, sad and gabD.

TABLE 43
OD, BDO, 4HB and GBL numbers of four replicates of a strain capable
of producing 4-hydroxybutyryl-CoA that had both tesB and ybgC
deleted (1197) and compared with the control with neither of these
deletions (Host 1136). All concentrations are in mM and were measured
after 40 hours of culture time in 20 mL bottles.

| Host | OD | BDO | 4HB | GBL |
|---|---|---|---|---|
| 1136 | 2.428 | 26.2 | 3.1 | 1.8 |
| | 2.344 | 27.4 | 2.7 | 1.7 |
| | 2.392 | 26.6 | 3.3 | 1.8 |
| 1197 | 3.324 | 29.9 | 2.8 | 1.0 |
| | 2.712 | 29.1 | 2.6 | 0.9 |
| | 2.924 | 32.0 | 2.9 | 0.9 |

[0780] FIG. 79 shows the average BDO and 4HB numbers from three replicates of a host strain that had the genes ybgC and tesB deleted (1197) compared with the corresponding averages from three replicates of the control strain (1136). FIG. 80 shows the average GBL numbers from three replicates of a host strain that had the genes ybgC and tesB deleted (1197) compared with the corresponding averages from three replicates of the control strain (1136). These results demonstrate that deletion of one or more acyl coenzyme A thioesterases decreased production of gamma-butyrolactone, increased production of BDO and had no adverse affect on production of 4HB.

### Example XXXVII

### Deletions to Prevent or Reduce Backflux into the Pathway

[0781] This example describes deletions to prevent backflux into the pathway. See corresponding example in WO2013/186402.

[0782] At high titers of 1,4-butanediol (BDO) in the culture, it starts to get reimported into the cells. Once inside the cells, it is metabolized through the TCA cycle. To prevent this backflux of BDO into the cells, alcohol dehydrogenases that were identified as candidates for the reverse flux were deleted. The candidates were identified by two approaches, first, all the alcohol dehydrogenases were listed and prioritized based on their substrate specificity. Microarrays were conducted to determine how high each one of them was expressed. Based on this, a short list of 5 candidates was generated from a list of approximately 35 adh candidates. Secondly, protein fractions with endogenous backflux activity (NADP+ dependent BDO conversion to 4-hydroxybutyraldehyde) were isolated from strain 1427 (alcohol dehydrogenase encoded by yqhD removed and no downstream pathway present, cells accumulate 4HB but do not make BDO) grown microaerobically in MM9 media. The sample was purified while following the backflux activity. The strategy employed is outlined below.

[0783] Based on early experiments, the endogenous ADH activity was found to be primarily NADPH dependent and salted out in high (>35%) ammonium sulfate. A fresh sample of 1427 cells from a 2L LB preparation grown aerobically overnight was lysed using the microfluidizer at 15,000 psi. The sample was then fractionated via ammonium sulfate. The 35% pellet contained little ADH activity and was not processed further, while the 60% pellet contained active ADH with significant backflux activity and was moved onto further purification.

[0784] Anion Exchange Purification.

[0785] The 60% ammonium sulfate pellet was resuspended in a low salt buffer and dialyzed overnight to remove the residual ammonium sulfate. The sample was loaded onto a 5 ml Q-sepharose column (strong anion exchange) and eluted via a slow increasing salt gradient. The profile for the anion exchange elution, backflux activity, as well as the SDS page for the fractions is shown below in FIG. 81.

[0786] The first large peak shown on the left is off-scale and corresponds to proteins that did not bind the column. The peak had low backflux activity. The next peak shown in the middle of the chromatogram had significant backflux activity An SDS-PAGE of this peak was run and indicates that further purification is needed in order to isolate the protein of interest.

[0787] Size Exclusion Chromatography.

[0788] The peak backflux activity from anion exchange was pooled and concentrated to allow for application to a 5200 sephacryl size exclusion column. The column successfully removed impurities from the sample and the results are shown below (FIG. 82).

[0789] The results of the sizing column indicated that the protein of interest behaved as a mid-range MW protein, ˜50 kDa. However, it was not clear what the identity of the protein was, but it narrowed down to approximately 20 bands on the gel. Additional chromatography was performed to attempt to clean up the sample prior to mass spec analysis.

[0790] Hydrophobic Interaction Chromatography.

[0791] The peak with the highest backflux activity from the size exclusion column was pooled and loaded on a phenyl sepharose column (hydrophobic interaction column). The ionic strength of the sample was increased to facilitate binding to the resin. The results are shown below (FIG. 83).

[0792] The sample shown on the SDS-PAGE was analyzed by mass spectrometry in order to identify the protein(s) that is responsible for the backflux. From the gel there are 5 prominent bands alongside a small handful of background proteins (˜5).

[0793] The purified sample was analyzed by mass spectrometry analysis, and a list of 30 proteins was obtained. From this list the gene selected was:

| Accession | Name | Gene |
|---|---|---|
| gi\|170083708 | Zn-dependent/NAD(P)-binding | yjgB |
| | alcohol dehydrogenase | |

[0794] The yjgB gene was cloned with a streptavidin tag, expressed and purified in order to characterize its properties. The results of the purification, as analyzed by SDS-PAGE, are shown in FIG. 84. The protein expressed well, and acceptable yields of purified protein were obtained. Initial characterization with BDO as a substrate was performed in the presence of NADP+ and robust activity was confirmed (see FIG. 85).

[0795] On the basis of the protein fractionation and the microarray results, four genes were selected and deleted on top of each other to obtain strain 1889 from 1872. The genes were yqhD (b3011; GenBank NP_{—}417484.1, GI:16130909), yjgB (b4269; GenBank NP_{—}418690.4, GI:90111716), yahK (b0325; GenBank NP_{—}414859.1, GI:16128310) and adhP (b1478; GenBank NP_{—}415995.4, GI:90111280).

[0796] The deletions of these four alcohol dehydrogenases were introduced in strain 1872. This strain is based on strain ECKh-432 whose construction is described above and in US20110045575. Notable modifications include deletions in adhE, ldhA, pf1B, mdh, and arcA. Strain ECKh-432 also contains chromosomally integrated copies of sucD from Porphyromonas gingivalis (encoding CoA-dependant succinate semialdehyde dehydrogenase), sucA from Mycobacterium bovis (encoding alpha-ketoglutarate decarboxylase), 4hbd from P. gingivalis (encoding 4-hydroxybutyrate dehydrogenase), and 4hbd from Clostridium kluyveri (encoding 4-hydroxybutyrate dehydrogenase). Strain 1872 contains a chromosomally integrated copy of 4-hydroxybutyryl-CoA transferase expressed from the pA promoter at the attB locus.

TABLE 44
OD, BDO, 4HB and GBL numbers of four replicates of a strain that
had all four alcohol dehydrogenases identified for carrying backflux
deleted (1889) compared with the control with neither of these
deletions (Host 1872). The gene cat2 for 4HB conversion into
4-hydroxybutyryl-CoA was expressed on F′ whereas ALD and
ADH were expressed on pZS*-13S as described already. All
concentrations are in mM and were measured after 24 hours of
culture time in 96 well-plates.

| Host | OD | 4HB | BDO | GBL |
|---|---|---|---|---|
| 1872 | 4.61 | 3.3 | 60.8 | 12.5 |
| 1872 | 6.09 | 3.6 | 90.2 | 15.3 |
| 1872 | 5.88 | 3.1 | 84.4 | 17.3 |
| 1872 | 5.84 | 2.9 | 96.3 | 15.9 |
| 1889 | 5.94 | 3.6 | 92.6 | 14.0 |
| 1889 | 6.59 | 3.3 | 88.9 | 13.1 |
| 1889 | 6.59 | 3.3 | 82.4 | 13.4 |
| 1889 | 6.58 | 3.6 | 89.4 | 14.4 |

[0797] FIG. 86 shows the average BDO, 4HB and GBL numbers for the strain 1872 versus strain 1889. These results demonstrate that metabolic modifications that decrease backflux result in an increased yield of BDO and no adverse affect on production of 4HB.

### Example XXXVIII

### Deletions to Improve the Energetic Efficiency of Oxidative Phosphorylation

[0798] This example describes deletions to improve the energetic efficiency of oxidative phosphorylation. See corresponding example in WO2013/186402.

[0799] The electron transport chain of Escherichia coli has multiple NADH dehydrogenases and cytochrome oxidases, with varying ability to translocate protons. For example, NADH dehydrogenase II in E. coli is an NADH consuming system that is not linked with proton translocation (H+/2e−=0) whereas NADH dehydrogenase I encoded by nuo is reported to translocate 4 protons per pair of electrons. The major role of Ndh-II is to oxidize NADH and to feed electrons into the respiratory chain (Yun et al., J. Appl. Microbiol. 99:1404-1412 (2005)). The affinity of NdhII for NADH is relatively low (Hayashi et al., Biochim. Biophys. Acta 977:62-69 (1989)). It has been suggested that NdhII may operate to regulate the NADH pool independently of energy generation and is likely to be important when the capacity of bacteria to generate energy exceeds demand. The ndh gene has been shown to be repressed by the fnr gene product in such a way that the expression is optimal under conditions of high oxygen concentrations. The deletion of ndh would thus help in improving the energy efficiency of the cell. Similarly, there are several other NADH dehydrogenases that are not known to translocate any protons and thus do not help in ATP production, for example, wrbA, yieF, and kefF in E. coli. Homologues of these can be found in other organisms and eliminated to improve the ATP production for every unit of oxygen consumed.

[0800] Host strain 879 (the parent strain for ndh deletion) was based on strain ECKh-432 whose construction is described above and in US20110045575. Notable modifications include deletions in adhE, ldhA, pflB, mdh, and arcA. Strain ECKh-432 also contains chromosomally integrated copies of sucD from Porphyromonas gingivalis (encoding CoA-dependant succinate semialdehyde dehydrogenase), sucA from Mycobacterium bovis (encoding alpha-ketoglutarate decarboxylase), 4hbd from P. gingivalis (encoding 4-hydroxybutyrate dehydrogenase), and 4hbd from Clostridium kluyveri (encoding 4-hydroxybutyrate dehydrogenase). Strain 879 also has deletions of the succinate semialdehyde dehydrogenase genes, sad and gabD.

TABLE 45
The BDO, 4HB and GBL production in three replicates of the strain that
had ndh deleted compared with the replicates of the host strain (879) with
ndh intact. The experiments were conducted in 20 mL bottles as
described in the protocol. The ALD and ADH were present on the
plasmid pZS* to allow the conversion of 4-HB CoA to 4-HB aldehyde
and subsequently to BDO. All concentrations are in mM and were
measured after 24 hours of culture time.

| Host | OD | BDO | GBL | 4HB |
|---|---|---|---|---|
| 879 | 1.61 | 3.27 | 0.83 | 1.28 |
| 879 | 2.45 | 4.15 | 0.99 | 1.14 |
| 956 | 2.31 | 4.48 | 0.63 | 1.01 |
| 956 | 2.01 | 4.31 | 0.59 | 0.96 |
| 956 | 2.54 | 4.92 | 0.59 | 1.00 |

[0801] FIG. 87 shows the average BDO, 4HB and GBL numbers for the strain 956 versus strain 879. These results demonstrate that deletions that improve the energy efficiency of oxidative phosphorylation increase the yield of BDO and have no adverse affect on 4HB production.

### Example XXXIX

### Deletion of Cytochrome Oxidases

[0802] This example describes deletion of cytochrome oxidases. See corresponding example in WO2013/186402.

[0803] On the electron output side of the electron transport chain, multiple cytochrome oxidases are present that have different energy-conserving efficiencies. The cytochrome bo complex, encoded by the cyo operon, actively pumps electrons over the membrane and results in an H+/2e− stoichiometry of 4. The cytochrome bd-I complex does not actively pump protons, but due to the oxidation of the quinol on the periplasmic side of the membrane and subsequent uptake of protons from the cytoplasmic side of the membrane, which are used in the formation of water, the net electron transfer results in a H+/2e− stoichiometry of 2. This is encoded by the cyd operon. Until recently, the proton translocation stoichiometry of cytochrome bd-II oxidase, encoded by appBC, was not known, but it has now been established that this oxidase is electrogenic (Borisov et. al., Proc. Natl. Acad. Sci. USA 108:17320-17324 (2011)). These genes are normally induced upon entry into stationary phase or under conditions of carbon and phosphate starvation (Atlung et al., J. Bacteriol. 179:2141-2146 (1997)).

[0804] Properties and Abundance of the Cytochrome Oxidases:

[0805] The cyd operon is regulated in an oxygen-dependent manner by fnr and arcA and the expression is optimal under microaerophilic conditions (Calhoun et al., J. Bacteriol. 175:3020-3025 (1993)). The bo-type oxidase predominates when E. coli is grown at high oxygen tension. The cyo operon is also regulated by both arcA and fnr. A literature study indicates that in aerobically grown cells the cytochrome o oxidase is present at a level of approximately 304 molecules per cell and the cytochrome d oxidase at 204 molecules per cell (Minohara et al., J. Biosci. Bioengineer. 93(5):464-469 (2002)). Under anaerobic conditions, cytochrome d oxidase is predominant and is present at about 606 molecules per cell in contrast to only 2 molecules per cell of cytochrome o oxidase. The Km for O₂ of cytochrome bd oxidase is much lower than that of the cytochrome bo oxidase (Minohara et al, supra, 2002). The former has a Km of 10 nM, and cytochrome bo oxidase has a Km of ˜1 μM.

TABLE 46
Enzymatic characteristics of the cytochrome-bd oxidases from E. coli (from Bekker et al., J. Bacteriol.
191: 5510-5517 (2009))).

| | | | | | In vivo sp act (mol |
|---|---|---|---|---|---|
| | Vₘₐₓ (mol O/mol | Kₘ (O₂) at | Kₘ (UQ-H₂) at | Cellular content | O₂/mol cytochrome |
| Cytochrome | cytochrome bd/s) | pH 7 (μM) | pH 7 (μM) | (nmol/g protein) | bd/s) |
| Cytochrome bd-I | 218 ± 20 | 0.3 | 85 ± 5 | 90 ± 29 | 58 ± 11 |
| Cytochrome bd-II | 818 ± 75 | 2.0 ± 0.3 | 250 ± 45 | 91 ± 32 | 70 ± 12 |
| Cytochrome bo | 225 | 6.0 | 47 | ND | ND |

[0806] In a study attempting to determine the P/O ratios in aerobically-grown E. coli (Noguchi et al., J. Biochem. 136:509-515 (2004)), it was determined that NDH-1 formed the predominant NADH dehydrogenase under both standard feed and limiting feed of glucose. However, cytochrome bd oxidase was found to be present in higher concentrations than cytochrome bo oxidase. The following table illustrates their findings on various NADH dehydrogenases and cytochrome oxidases.

TABLE 47
Concentrations of NADH dehydrogenases and cytochrome oxidase under aerobic growth
conditions with different glucose feeding strategies (from Noguchi et al., supra, 2004).

| | NDH-1 | NDH-2 | bo-type | bd-type | | |
|---|---|---|---|---|---|---|
| Conditions (Phase) | (μmol/s/mg of protein) | | | | NDH-1/Total (%) | bo-type/Total(%) |
| Standard glucose | | | | | | |
| (exponential: 3 h) | 1.58 ± 0.07 | 1.11 ± 0.06 | 1.38 ± 0.12 | 1.01 ± 0.10 | 58.8 ± 2.4 | 57.9 ± 4.5 |
| (exponential: 5 h) | 1.35 ± 0.03 | 0.86 ± 0.03 | 0.70 ± 0.05 | 1.07 ± 0.04 | 61.0 ± 1.4 | 39.6 ± 2.6 |
| (early stationary: 8 h) | 1.17 ± 0.01 | 0.88 ± 0.01 | 0.46 ± 0.03 | 0.98 ± 0.02 | 57.1 ± 0.5 | 32.0 ± 1.9 |
| Limited glucose | | | | | | |
| (early stationary) | 0.97 ± 0.05 | 0.70 ± 0.03 | 0.42 ± 0.04 | 0.75 ± 0.05 | 58.1 ± 2.29 | 36.0 ± 3.7 |

[0807] Effects of Deleting Cytochrome Oxidases:

[0808] A chemostat study has been reported for understanding the ratios of specific oxygen consumption rates for strains lacking different components of the electron transport chain between dilution rates of 0.1 and 0.7/hr (Calhoun et al., supra, 1993). Strains that were constrained to use the bd-type oxidase had increased oxygen consumption rates as compared to those that used only the cytochrome bo oxidase by a factor of 1.45-1.13. The ratio of the oxygen consumption rates for a strain that had both ndh and cyo deleted as compared to the strain with only ndh deleted was between 1.46 and 1.39. The authors of Calhoun et al., supra, 1993, concluded that the bd-type oxidase is less efficient than the bo-type oxidase but is still coupled.

[0809] In yet another study, it has been reported that E. coli wild-type cells containing both cytochrome bo and bd type terminal oxidases, pumped protons with a H+/O ratio of 4.5-4.9, but mutants with cytochrome bo oxidase deleted, showed ratios of 3.5-4.1 and the mutants with cytochrome bd oxidase showed a ratio of 4.8-5.6 (Minohara et al., supra, 2002). Mutants which lacked both cyo and cyd operon could not grow under aerobic conditions, but those that overexpressed cytochrome bo oxidase and those that overexpressed cytochrome bd oxidase grew as well as the parental W3110 strains. The cell yield of each of these strains was in proportion to their H+/O ratios. Interestingly, the strain which had cydAB deleted showed very poor cell yield initially. The cell yields were, however, improved dramatically once the cytochrome bo oxidase was overexpressed. The authors Minohara et al., supra, 2002) had hypothesized that the lower cell yields in the cyd mutant strain may be caused by the high H+ permeability of the membrane in the cyd mutant. They believed that the amounts of cytochrome bo in the mutant cells lacking the high-affinity oxygen-reducing cytochrome bd may not be sufficient to reduce the oxygen molecules at a low concentration, and thus the cell membranes were injured by reactive oxygen species and were made partially permeable. This cell stress could be relieved by overexpressing cytochrome bo oxidase (Minohara et al., supra, 2002).

TABLE 48
Properties of various E. coli mutants grown in a glucose-limited chemostat culture at a dilution rate
of 0.15/hr. The cytochrome shown in parentheses is the active cytochrome oxidase. Each of these strains also
had nuo deleted (from Bekker et al., supra, 2009).

| | q_{O2} {mmol | q_{glucose} {mmol | Y_{glucose} (g | q_{acetate} {mmol | q_{ATP} {mmol | |
|---|---|---|---|---|---|---|
| | (g [dry | (g [dry wt])⁻¹ | [dry wt]) (g | (g [dry wt])⁻¹ | (g [dry wt])⁻¹ | |
| Mutant | wt])⁻¹ h⁻¹} | h⁻¹} | Glc)⁻¹ | h⁻¹} | h⁻¹} | H⁺/2e⁻ |
| MB30 (cytochrome bd-I) | 8.8 ± 1.3 | 3.2 | 0.26 | 1.5 ± 0.5 | 16.3 ± 2.2 | 2 |
| MB37 (cytochrome bd-II) | 11.1 ± 0.6 | 6.0 | 0.14 | 5.7 ± 0.7 | 16.6 | 0.2 ± 0.1 |
| MB34 (cytochrome bo) | 6.4 ± 0.4 | 2.3 | 0.36 | 0.4 ± 0.4 | 17.0 ± 0.4 | 4 |

[0810] A recent paper (Bekker et al., J. Bacteriol. 191:5510-5517 (2009)) investigated the effects of deleting cytochrome bd-II oxidase. The phenotype of the mutant strain lacking the cytochrome bd-II oxidase included a smaller ubiquinone pool when grown under glucose-excess conditions. This strain also had a decreased oxygen flux in glucose-limited chemostat conditions. These results suggested that cytochrome bd-II oxidase contributed significantly to the overall respiratory electron flux. Wild type E. coli MG1655 cells had a specific respiration rate that was approximately 46% higher than that of the mutant strain that lacked appBC (8.7 vs. 5.9 mmol/gDCW·r). These were measured in glucose-limited chemostats at a dilution rate of 0.2/hr. In order to improve the energetic efficiency of the cells, the appBC was knocked out in the strains (Host strain 2424), and additionally cyoABCD was knocked out (Strain 2471). The table below shows the data for production of the C4 metabolites in 96 well plates with each of these strains. An additional advantage of deleting the two cytochrome oxidases (encoded by appBC and cyoABCD) and ndh is that it makes the cells relatively robust to a range of oxygen transfer rates in bigger fermenters. Since cydAB has a fixed stoichiometry for proton translacoation and so does nuo (NADH dehydrogenase I), the P/O ratio is rather constant and so is the biomass rate in different parts of a fermenter.

TABLE 49
The BDO, 4HB and GBL production in three replicates of the strains
1889 and 2471. The ALD and ADH were present on the plasmid pZS*
to allow the conversion of 4-HB CoA to 4-HB aldehyde and subsequently
to BDO. All concentrations are in mM and were measured after 24 hours
of culture time in 96-well plates.

| Host | OD | 4HB | BDO | GBL |
|---|---|---|---|---|
| 1889 | 3.63 | 5.71 | 57.20 | 4.48 |
| 1889 | 3.05 | 5.65 | 50.60 | 3.49 |
| 1889 | 3.40 | 4.14 | 51.90 | 3.90 |
| 1889 | 3.19 | 4.23 | 53.10 | 3.69 |
| 2471 | 3.56 | 5.62 | 64.20 | 4.80 |
| 2471 | 2.96 | 5.73 | 53.30 | 2.75 |
| 2471 | 3.07 | 5.39 | 42.80 | 2.67 |
| 2471 | 3.11 | 4.01 | 45.90 | 2.66 |

[0811] FIG. 88 shows the average BDO, 4HB and GBL numbers of the strains, 1889 (see above) and 2471. These results demonstrate that deletion of cytochrome oxidases results in deletion of appBC resulted in a decrease in BDO and 4HB production, although both BDO and 4HB are still produced in good quantities, and these cells are expected to exhibit improved energy efficiency that may be advantageous in scaled up fermentation conditions.

[0812] The results disclosed herein demonstrate high yield of desired products such as 4-HB, 4-HBal, 4-HBCoA, BDO or putrescine, in particular BDO. Such modifications have been demonstrated to increase product yield of BDO. Such beneficial modifications, including both increasing and decreasing expression of enzymes, resulted in decreased CO₂ loss, decreased by-product formation such as ethanol, acetate, pyruvate, alanine, glutamate and GBL. Additional modifications decreased backflux from desired products such as BDO into pathway intermediates or precursors such as those in the TCA cycle. Additional improvements have been made by identifying enzymes that more efficiently carry out a desired pathway reaction and optionally subjecting the enzyme to evolution to generate variants having improved characteristics such as increased substrate to product conversion, stability, and the like. Such enzymes have included cat2, aldehyde dehydrogenase and aldehyde dehydrogenase, as disclosed herein. In addition, various promoters have been tested to identify promoter variants that provide more efficient transcription of a gene. Additionally, as disclosed herein, various backflux and by-product reactions can decrease the efficiency of product formation in a desired pathway. In some cases, product yield can be increased by decreasing expression of a pathway enzyme if higher expression of the pathway enzyme results in an increase in by-product formation. For example, such a result has been observed with aldehyde dehydrogenas, in which lowere expression reduces ethanol production without lowering BDO production.

### Example XXXX

### Overexpression of Acetate Kinase and Phosphotransacetylase

[0813] This example describes overexpression of acetate kinase and phosphotransacetylase which improves the production of 4HB and BDO.

[0814] ackA refers to a gene that encodes for acetate kinase activity pta refers to a gene that encodes for phosphotransacetylase activity. The net reaction catalyzed by both enzymes involves the conversion of acetate, ATP, and CoA into acetyl-CoA, ADP and phosphate. The overexpression of acetate kinase and phosphotransacetylase leads to increased conversion of acetate to acetyl-CoA, thus reducing the secretion of acetate and increasing the production of 4hb and BDO. The E. coli ackA (NP_{—}416799.1, GI:16130231) and pta (NP_{—}416800.1, GI:16130232) genes were cloned on the plasmid pZS*13S under control of the weak constitutive promoter, p107. Expression of ackA and pta in such strains is thus increased over native levels.

[0815] Table 50 shows BDO, 4HB, and acetate production in a 96-well plate from the strain 4539 containing either an empty plasmid, pZS*13S, or containing a plasmid, pZS*13S-p107-301-302, that expresses ackA (301) and pta (302). The host strain 4539 is based on strain 3162 whose construction is described above. Strain 4539 contains chromosomally integrated copies of 4-hydroxybutyryl-CoA reductase (ALD), 4-hydroxybutyryaldehyde reductase (ADH) and 4-hydroxybutyryl-CoA transferase expressed from constitutive promoters. The genes used for these enzyme steps are described herein. The ADH was integrated on the chromosome under the promoter p119 at the hemN locus. The ALD was integrated on the chromosome under the promoter p119 at the aspA locus. The 4-hydroxybutyryl-CoA transferase was integrated on the chromosome at the attB locus under the p119 promoter. Strain 4539 additionally contains deletions in succinyl-CoA synthetase (sucCD) and a prophage integration site (yciI). In addition, the native promoter of ppc was replaced with a stronger constitutive promoter. Strain 4539 also contains an inactivated arcA gene. Table 50 shows that expression of acetate kinase and phosphotransacetylase enhances 4HB and/or BDO production while reducing acetate production in strain 4539 versus the controls denoted by “pZS*13S”. Cells were cultured using the 96 well-plate protocol described previously above.

TABLE 50
BDO, 4HB, and acetate production of E. coli host strain 4539 containing
either the plasmid construct denoted by “pZS*13S” which is empty
or the plasmid construct denoted by “pZS*13S-p107-301-302” which
expresses both ackA (301) and pta (302). BDO, 4HB, and acetate
concentrations are in mM.

| Host | Plasmid #1 | OD | 4HB | BDO | Acetate |
|---|---|---|---|---|---|
| 4539 | pZS*13S-p107-301-302 | 3.04 | 10.90 | 63.70 | 0.21 |
| 4539 | pZS*13S-p107-301-302 | 2.69 | 11.30 | 62.00 | Not measured |
| 4539 | pZS*13S-p107-301-302 | 2.56 | 10.40 | 61.60 | Not measured |
| 4539 | pZS*13S-p107-301-302 | 2.78 | 9.74 | 62.00 | Not measured |
| 4539 | pZS*13S-p107-301-302 | 2.99 | 12.20 | 61.50 | 1.00 |
| 4539 | pZS*13S-p107-301-302 | 2.85 | 11.90 | 62.10 | Not measured |
| 4539 | pZS*13S-p107-301-302 | 2.81 | 10.70 | 62.20 | Not measured |
| 4539 | pZS*13S-p107-301-302 | 2.95 | 12.60 | 64.10 | Not measured |
| 4539 | pZS*13S | 2.33 | 11.50 | 31.50 | 1.98 |
| 4539 | pZS*13S | 1.18 | 6.86 | 20.00 | Not measured |
| 4539 | pZS*13S | 1.41 | 7.17 | 21.60 | Not measured |
| 4539 | pZS*13S | 1.92 | 11.50 | 30.10 | Not measured |

### Example XXXXI

### Inactivation of arcA

[0816] This example describes the inactivation of the global regulator, arcA, which improves the production of 4HB and BDO.

[0817] An arcA mutation was reported to abolish function (Iuchi et al., Proc. Natl. Acad. Sci. USA 85:1888-1892 (1988)). It was later characterized (Silverman et al., J Bacteriol 173(18):5648-5652 (1991)) and found to have an 8 amino acid insertion near the N-terminus of the protein (see sequence below). To test the effect of this arcA mutation, we restored the mutant and wild-type versions of arcA in strain 3162, described above and which contains a deletion in arcA, to create strains 3353 and 3511, respectively. In both strains, the ALD and ADH were expressed in E. coli from the pZS*-13S plasmid to allow a functional pathway from 4-hydroxybutyryl-CoA to 1,4-butanediol. Table 51 shows that 4HB and BDO production are higher in strain 3353, which contains the inactivated arcA gene, compared to strain 3511, which contains the wild-type arcA gene. Cells were cultured using the 96 well-plate protocol described previously.

TABLE 51
BDO, 4HB, and glutamate production of E. coli host strains 3353
(which contains an inactivated arcA) and 3511 (which contains
wild-type arcA). BDO, 4HB, and acetate concentrations are in mM.

| Host | Plasmid | OD | 4HB | BDO | Glu |
|---|---|---|---|---|---|
| 3353 | pZS*13S-ALD-ADH | 3.8 | 0.77 | 57.3 | 0.00 |
| 3353 | pZS*13S-ALD-ADH | 3.8 | 0.77 | 54.6 | 0.00 |
| 3353 | pZS*13S-ALD-ADH | 3.9 | 0.78 | 60.0 | 0.00 |
| 3353 | pZS*13S-ALD-ADH | 3.7 | 0.89 | 63.1 | 0.00 |
| 3511 | pZS*13S-ALD-ADH | 3.1 | 0.28 | 17.1 | 0.45 |
| 3511 | pZS*13S-ALD-ADH | 3.0 | 0.35 | 17.5 | 0.43 |
| 3511 | pZS*13S-ALD-ADH | 2.7 | 0.20 | 10.8 | 0.44 |
| 3511 | pZS*13S-ALD-ADH | 3.1 | 0.03 | 11.7 | 0.46 |

[0818] The method for restoration of the mutant arcA gene is described below. All cloning for the insertion or deletion of genes in the chromosome of E. coli were based on the utilization of the sacB gene from Bacillus subtilis (ncbi.nlm.nih.gov/pubmed?term=6402497). The vector used is pRE 118 (ATCC87693) deleted of the oriT and IS sequences. The resulting vector (3.6 kb in size and carrying the kanamycin resistance gene) was sequenced and called pRE118-V2. All clonings of fragments were done into the restriction sites KpnI and PstI of pRE118-V2, unless otherwise indicated. All PCR amplification used genomic DNA from E. coli MG1655 (ATCC47076) as DNA template. The first integration event in the chromosome was selected on LB agar plates containing Kanamycin (25 or 50 mg/L). Clones with the correct insertion were selected for resolution. They were sub-cultured twice in plain liquid LB at the desired temperature and serial dilutions were plated on LB-no salt-sucrose 10% plates. Clones that grew on sucrose containing plates were screened for the loss of the kanamycin resistance gene on LB-low salt agar medium and the deletion/insertion of the fragment of interest was verified by PCR and sequencing of the encompassing region.

[0819] The E. coli arcA gene was amplified by PCR using genomic DNA form E. coli MG1655 and primers primers ArcA-up-KpnI (5′-tattattatggtaccaatatcatgcagcaaacggtgcaacattgccg-3′; SEQ ID NO:34) and ArcA-down-PstI (5′-ataaaaccctgcagggaaacgaagttttatccatttttggttacctg-3′; SEQ ID NO:36). The fragment was subsequently digested with the restriction enzymes KpnI and PstI, then ligated into the pRE118-V2 plasmid digested with PstI and KpnI, leading to plasmid pRE118-arcA. The nucleotide sequence of the arcA fragment was verified. An 8 amino acid insertion EGYDVFEA (SEQ ID NO:181) was created by site-directed mutagenesis using primers arcA-8aa-mut-frw 5′-ATGATGTTTTCGAAGCGGAAGGCTATGATGTTTTCGAAGCGACAGATGGCGCGGAAATGCA TCAGATCC-3′ (SEQ ID NO:182) and arcA-8aa-mut-rev 5′-TTTCCGCGCCATCTGTCGCTTCGAAAACATCATAGCCITCCGCTTCGAAAACATCATAGCCT TCCGCTTCG-3′ (SEQ ID NO:183). This 8 AA insertion was located as described in Silverman et al., J. Bact. (173) 18:5648-5652 (1991)).

[0820] pRE118-arcA* was introduced into electro-competent cells of E. coli. After integration and resolution on LB-no salt-sucrose plates as described above, the sequence of the arcA region in the chromosome was verified by sequencing using primers arcA-diag-up2 5′-taatgatatttcgcccgactgcgc-3′ (SEQ ID NO:184) and arcA-diag2-down 5′-aatgaacggtatttatttgcaagegg-3′ (SEQ ID NO:185) and is as follows (the nucleotide sequence of the wild-type arcA gene is underlined, and the added fragment shown in bold):

(SEQ ID NO: 186)
TAATGATATTTCGCCCGACTGCGCGCAGTGGTGGCGACAGTGAAAT
CGACATCGTGTAACGATTCAGCCAATGTCGGGAAAACTTTAATATT
ATCAATAATATCACCAGATCCATGTGCGACCCAGCGGGTGGCTGGC
TCCAGGTGTGCCTGACTATCGACAATCCGCAGATCGCTAAACCCCA
TCGTTTTCATTGCCCGCGCCGCTGCCCCAATATTTTCTGCTCTGGC
GGGTGCGACCAGAATAATCGTTATACGCATATTGCCACTCTTCTTG
ATCAAATAACCGCGAACCGGGTGATCACTGTCAACTTATTACGCGG
TGCGAATTTACAAATTCTTAACGTAAGTCGCAGAAAAAGCCCTTTA
CTTAGCTTAAAAAAGGCTAAACTATTTCCTGACTGTACTAACGGTT
GAGTTGTTAAAAAATGCTACATATCCTTCTGTTTACTTAGGATAAT
TTTATAAAAAATAAATCTCGACAATTGGATTCACCACGTTTATTAG
TTGTATGATGCAACTAGTTGGATTATTAAAATAATGTGACGAAAGC
TAGCATTTAGATACGATGATTTCATCAAACTGTTAACGTGCTACAA
TTGAACTTGATATATGTCAACGAAGCGTAGTTTTATTGGGTGTCCG
GCCCCTCTTAGCCTGTTATGTTGCTGTTAAAATGGTTAGGATGACA
GCCGTTTTTGACACTGTCGGGTCCTGAGGGAAAGTACCCACGACCA
AGCTAATGATGTTGTTGACGTTGATGGAAAGTGCATCAAGAACGCA
ATTACGTACTTTAGTCATGTTACGCCGATCATGTTAATTTGCAGCA
TGCATCAGCAGGTCAGGGACTTTTGTACTTCCTGTTTCGATTTAGT
TGGCAATTTAGGTAGCAAACATGCAGACCCCGCACATTCTTATCGT
TGAAGACGAGTTGGTAACACGCAACACGTTGAAAAGTATTTTCGAA
GCGGAAGGCTATGATGTTTTCGAAGCGGAAGGCTATGATGTTTTCG
AAGCGACAGATGGCGCGGAAATGCATCAGATCCTCTCTGAATATGA
CATCAACCTGGTGATCATGGATATCAATCTGCCGGGTAAGAACGGT
CTTCTGTTAGCGCGTGAACTGCGCGAGCAGGCGAATGTTGCGTTGA
TGTTCCTGACTGGCCGTGACAACGAAGTCGATAAAATTCTCGGCCT
CGAAATCGGTGCAGATGACTACATCACCAAACCGTTCAACCCGCGT
GAACTGACGATTCGTGCACGCAACCTACTGTCCCGTACCATGAATC
TGGGTACTGTCAGCGAAGAACGTCGTAGCGTTGAAAGCTACAAGTT
CAATGGTTGGGAACTGGACATCAACAGCCGTTCGTTGATCGGCCCT
GATGGCGAGCAGTACAAGCTGCCGCGCAGCGAGTTCCGCGCCATGC
TTCACTTCTGTGAAAACCCAGGCAAAATTCAGTCCCGTGCTGAACT
GCTGAAGAAAATGACCGGCCGTGAGCTGAAACCGCACGACCGTACT
GTAGACGTGACGATCCGCCGTATTCGTAAACATTTCGAATCTACGC
CGGATACGCCGGAAATCATCGCCACCATTCACGGTGAAGGTTATCG
CTTCTGCGGTGATCTGGAAGATTAATCGGCTTTACCACCGTCAAAA
AAAACGGCGCTTTTTAGCGCCGTTTTTATTTTTCAACCTTATTTCC
AGATACGTAACTCATCGTCCGTTGTAACTTCTTTACTGGCTTTCAT
TTTCGGCAGTGAAAACGCATACCAGTCGATATTACGGGTCACAAAC
ATCATGCCGGCCAGCGCCACCACCAGCACACTGGTTCCCAACAACA
GCGCGCTATCGGCAGAGTTGAGCAGTCCCCACATCACACCATCCAG
CAACAACAGCGCGAGGGTAAACAACATGCTGTTGCACCAACCTTTC
AATACCGCTTGCAAATAAATACCGTTCATTA.

### Example XXXXII

### Truncation of crr

[0821] This example describes improved 4-HB and BDO production using a truncated variant of the glucose PTS permease HA domain.

[0822] To achieve higher BDO titer and yield, the rate of glucose uptake and glycolytic flux can be balanced with the rate of BDO production. One mechanism for balancing these fluxes is to alter one or more components of a glucose transporter. In this example, improved BDO production was demonstrated using a truncated variant of the glucose PTS permease component IIA (EIIA[Glc]), encoded by crr. The glucose PTS system transports and simultaneously phosphorylates glucose, releasing glucose-6-phosphate into the cytoplasm and concomitantly converting phosphoenolpyruvate to pyruvate. The IIA[Glc] component mediates the transfer of the phosphoryl group from histidine protein Hpr (ptsH) to the IIB[Glc] (ptsG) component. A truncated variant of the crr gene was introduced into BDO producing strains. The resulting gene is called 2311A (crr*). The DNA sequence of 2311A is shown in Table 52. Strains with the crr variant exhibit reduced production of the byproducts acetate, pyruvate and glutamate, and an increase in BDO titers and yields. Without being bound by a particular theory, the truncated variant is expected to slow down glucose uptake, thereby balancing flux through glycolysis with BDO production.

[0823] To test the performance of truncated crr relative to the wild type protein, a wild-type crr variant was restored in the strain ECKh-5491, resulting in the strain ECKh-5717. The host strain ECKh-5491 is based on strain ECKh-432 whose construction is described above and in US20110045575. Notable modifications include in deletions in aclhE, ldhA, pflB and mdh. Strain ECKh-5491 also contains chromosomally integrated copies of sucD from Porphyromonas gingivalis (encoding CoA-dependant succinate semialdehyde dehydrogenase) and 4hbd from P. gingivalis (encoding 4-hydroxybutyrate dehydrogenase). Additionally, strain 5491 contains chromosomally integrated copies of 4-hydroxybutyryl-CoA reductase (ALD), 4-hydroxybutyryaldehyde reductase (ADH) and 4-hydroxybutyryl-CoA transferase. The genes for these enzyme steps are described herein. The ADH was integrated on the chromosome under the promoter p119 at the hemN locus. The ALD was integrated on the chromosome under the promoter p119 at the aspA locus. The 4-hydroxybutyryl-CoA transferase was integrated on the chromosome at the attB locus under the p119 promoter. Strain 5491 contains deletions in the native alcohol dehydrogenase genes aclhP, yqhD, yahK, and yjgB. This strain also has deletions of cytochrome oxidases, cyoABCD and appBC, succinyl-CoA synthetase (sucCD), a prophage integration site (yciI) and flagellar biosynthesis genes (flhCD, motA), the predicted transporter (yebQ), aspartate-ammonia lyase (aspA), the ferrichrome/phage/antibiotic outer membrane porin (fhuA), glutamate synthase (gltBD), a low specificity threonine aldolase (ltaE), PEP carboxykinase (pckA), the glycine cleavage system component (gcvT), the maltose outer membrane porin/phage lambda receptor protein (lamB), and the fimbriae genes (fimABCDEFGHI). In addition, the native promoter of ppc was replaced with a stronger constitutive promoter. Strain 5491 also contains an inactivated arcA gene. Several native genes are overexpressed on a low-copy plasmid in both 5491 and 5717: ackA, pta, sucA, sucB and lpdA.

[0824] Table 52 shows OD and LCMS data for BDO, 4HB, acetate and pyruvate levels of the strain with the crr-variant ECKh-5491(2311A) with respect to the control, 5717 (crr-wt). Four replicates of each strain were cultured in 24-well plates. All concentrations are in mM and were measured after 24 hours of culture time. Higher BDO and 4HB were observed in cells with the truncated crr variant 2311A. Additionally, the crr variant produced lower levels of the byproducts ethanol and pyruvate. Gene sequence for 2311A (crr*) SEQ ID NO:187.

TABLE 52
BDO, 4HB, acetate and pyruvate levels of the
strain with the crr-variant ECKh-5491(2311A)
with respect to the control, 5717 (crr-wt).

| Host | OD 24h | BDO | 4HB | Acetate | Pyruvate |
|---|---|---|---|---|---|
| 5491 | 19.82 | 216.0 | 22.8 | 4.8 | 1.1 |
| 5491 | 11.46 | 247.0 | 24.6 | 3.2 | 1.1 |
| 5491 | 12.67 | 248.0 | 27.6 | 4.3 | 1.1 |
| 5491 | 7.14 | 248.0 | 28.3 | 3.6 | 1.1 |
| 5717 | 37.81 | 199.0 | 18.1 | 64.9 | 46.3 |
| 5717 | 30.89 | 168.0 | 18.7 | 69.7 | 50.4 |
| 5717 | 22.97 | 179.0 | 18.9 | 78.3 | 52.4 |
| 5717 | 25.43 | 157.0 | 18.2 | 48.0 | 33.1 |

Gene sequence for 2311A (crr*):
(SEQ ID NO: 187)
atgggtttgttcgataaactgaaatctctggtttccgacgacaaga
aggataccggaactattgagatcattgctccgctctctggcgagat
cgtcaatatcgaagacgtgccggatgtcgtttttgcggaaaaaatc
gttggtgatggtattgctatcaaaccaacgggtaacaaaatggtcg
cgccagtagacggcaccattggtaaaatctttgaaaccaaccacgc
attctctatcgaatctgatagcggcgttgaactgttcgtccacttc
ggtatcgacaccgttgaactgaaaggcgaaggcttcaagcgtattg
ctgaagaaggtcagcgcgtgaaagttggcgatactgtcattgaatt
tgatctgccgctgctggaagagaaagccaagtctaccctgactccg
gttgttatctccaacatggacgaaatcaaagaactgatcaaactgt
ccggtagcgtaaccgtgggtgaaacccataagcgctaa

### Example XXXXIII

### Additional BDO and 4HB Producing Strains with Enzyme Variants

[0825] This examples describes enzyme variants providing production of BDO, 4HB and/or other intermediates in a 4HB or BDO pathway.

[0826] Variants of cat2 were generated using site-directed mutagenesis and/or saturation mutagenesis and/or error-prone PCR and/or directed evolution. Variants were screened for production of products and/or byproducts such as BDO or ethanol in high-throughput assays or in in vitro assays as well as for product inhibition, such as with BDO. Additional variants were generated by random combinations of mutations.

[0827] Exemplary screening methods for Cat2 activity include, for example, Cat2 in vitro activity assay and in vivo assay for BDO or BDO and ethanol production. With respect to the Cat2 in vitro activity, the respective clones carrying a plasmid with a Strep-tagged gene construct were grown in LB medium and induced with IPTG (0.2 mM) for Cat2 expression. Cells were collected by centrifugation and then lysed (either chemically or by sonication). Cell debris was removed by centrifugation and the obtained supematant diluted in binding buffer (12.5 mM Tris/HCl pH 7.5, 1 mM EDTA, 70 mM NaCl). 200 μl of the diluted supematant was added per well to a StrepTactin coated plate. The plate was incubated for 2 hours at 4° C. to allow adsorption of the strep-tagged protein to the plate. After the incubation, unbound lysate components were removed by washing three times with wash buffer (200 μl of 0.05% Tween 20 in phosphate buffered saline). Cat2 activity was measured by monitoring the production of acetate after addition of substrate (20 mM 4-hydroxybutyrate, 2 mM acetyl-CoA) by addition of a commercially available acetate quantification reagent. To measure inhibition of Cat2, the assay was performed in the absence and presence of BDO (up to 1M).

[0828] With respect to the in vivo assay for measuring BDO and ethanol, a high throughput in vivo assay was performed. Briefly, a BDO production strain harboring variants of the cat2 gene was grown in 96 well-plate format. After 16 hours of growth in a micro-aerobic environment, the culture supematant was assayed for BDO or ethanol. Both detection methods utilized an enzymatic conversion of the alcohol (1,4 butanediol or ethanol) to the respective aldehyde (4-hydroxybutryaldhyde or acetaldehyde) via formation of NAD(P)H, monitored at 340 nm. The assays were conducted in 96 well polystryrene plates with 200 μl assay mixture. The assay mixture for BDO detection contained 50 mM Tris pH 7.4, 5 mM NADP+ and 3 μg of a BDO-specific alcohol dehydrogenase. The assay mixture for ethanol detection contained 50 mM Tris pH 7.4, 5 mM NAD+ and 3 μg of an ethanol-specific alcohol dehydrogenase. The enzyme reaction was initiated with addition of 10 μl of spent media and allowed to proceed for 30 min at 42° C. The final concentration of BDO or ethanol is determined by extrapolation to a standard curve. Variant enzymes were identified that exhibited increased activity in the presence of BDO. Certain variants exhibited activity of about 1.2 fold, about 2.5-fold, or about 2.8-fold higher activity in the presence of BDO than wild type. Variants with combinations of two or more variant amino acid positions exhibited activities greater than wild type. Generating enzyme variants by combining active variant amino acid positions resulted in enzyme variants with improved properties.

[0829] Table 53 provides exemplary cat2 sequences based on homology One skilled in the art will readily understand that such sequences can be analyzed with routine and well known methods for aligning sequences (for example BLAST, blast.ncbi nlm nih gov; Altschul et al., “J. Mol. Biol. 215:403-410 (1990)). Such alignments can provide information on conserved residues that can be utilized to identify a consensus sequence for preserving enzyme activity as well as positions for generating further enzyme variants.

TABLE 53
Exemplary cat2 sequences.

| Description | Accession No. |
|---|---|
| hypothetical protein HMPREF0404_00865 [Fusobacterium sp. 21_1A] | ZP_08581574.1 |
| >gb\|EGN64817.1\|hypothetical protein HMPREF0404_00865 [Fusobacterium sp. | GI: 336400801 |
| 21_1A] | (SEQ ID NO: 248) |
| acetyl-CoA hydrolase [Fusobacterium sp. 3_1_33] >gb\|EEW95213.1\|acetyl-CoA | ZP_05814664.1 |
| hydrolase [Fusobacterium sp. 3_1_33] | GI: 260494534 |
| | (SEQ ID NO: 249) |
| 4-hydroxybutyrate coenzyme A transferase [Fusobacterium sp. 7_1] | ZP_04575154.1 |
| >ref\|ZP_06523842.1\|4-hydroxybutyrate coenzyme A transferase [Fusobacterium sp. | GI: 237744673 |
| D11] >gb\|EEO42114.1\|4-hydroxybutyrate coenzyme A transferase [Fusobacterium | (SEQ ID NO: 250) |
| sp. 7_1] >gb\|EFD80031.1\|4-hydroxybutyrate coenzyme A transferase | |
| [Fusobacterium sp. D11] | |
| 4-hydroxybutyrate CoA-transferase [Fusobacterium sp. 11_3_2] >gb\|EGN63628.1\|4- | ZP_08598403.1 |
| hydroxybutyrate CoA-transferase [Fusobacterium sp. 11_3_2] | GI: 336418124 |
| | (SEQ ID NO: 251) |
| acetyl-CoA hydrolase [Desulfomonile tiedjei DSM 6799] >gb\|AFM24316.1\|acetyl- | YP_006446580.1 |
| CoA hydrolase [Desulfomonile tiedjei DSM 6799] | GI: 392409973 |
| | (SEQ ID NO: 252 |
| 4-hydroxybutyrate coenzyme A transferase [Porphyromonas uenonis 60-3] | ZP_04054791.1 |
| >gb\|EEK17275.1\|4-hydroxybutyrate coenzyme A transferase [Porphyromonas | GI: 228469852 |
| uenonis 60-3] | (SEQ ID NO: 253) |
| acetyl-CoA hydrolase/transferase [Pelosinus fermentans DSM 17108] | ZP_10325539.1 |
| >gb\|EIW32362.1\|acetyl-CoA hydrolase/transferase [Pelosinus fermentans DSM | GI: 392960066 |
| 17108] | (SEQ ID NO: 254) |
| 4-hydroxybutyrate coenzyme A transferase [Megasphaera sp. UPII 135-E] | ZP_08710943.1 |
| >gb\|EGS33214.1\|4-hydroxybutyrate coenzyme A transferase [Megasphaera sp. UPII | GI: 342218327 |
| 135-E] | (SEQ ID NO: 255) |
| acetyl-CoA hydrolase/transferase [Pelosinus fermentans B4] >ref\|ZP_15522476.1\| | ZP_15516677.1 |
| acetyl-CoA hydrolase/transferase [Pelosinus fermentans B3] >ref\|ZP_15526118.1\| | GI: 421053705 |
| acetyl-CoA hydrolase/transferase [Pelosinus fermentans A12] >ref\|ZP_15532060.1\| | (SEQ ID NO: 256) |
| acetyl-CoA hydrolase/transferase [Pelosinus fermentans A11] >gb\|EIW19212.1\| | |
| acetyl-CoA hydrolase/transferase [Pelosinus fermentans B4] >gb\|EIW25056.1\|acetyl- | |
| CoA hydrolase/transferase [Pelosinus fermentans A11] >gb\|EIW34652.1\|acetyl-CoA | |
| hydrolase/transferase [Pelosinus fermentans B3] >gb\|EIW37648.1\|acetyl-CoA | |
| hydrolase/transferase [Pelosinus fermentans A12] | |
| 4-hydroxybutyrate CoA-transferase [Fusobacterium periodonticum ATCC 33693] | ZP_06027623.1 |
| >gb\|EFE85797.1\|4-hydroxybutyrate CoA-transferase [Fusobacterium periodonticum | GI: 262068011 |
| ATCC 33693] | (SEQ ID NO: 257) |
| 4-hydroxybutyrate CoA-transferase [Fusobacterium nucleatum subsp. animalis ATCC | ZP_16968033.1 |
| 51191] >gb\|EGQ78661.1\|4-hydroxybutyrate CoA-transferase [Fusobacterium | GI: 422945708 |
| nucleatum subsp. animalis ATCC 51191] | (SEQ ID NO: 258) |
| 4-hydroxybutyrate coenzyme A transferase [Fusobacterium sp. 4_1_13] | ZP_04572671.1 |
| >gb\|EEO40050.1\|4-hydroxybutyrate coenzyme A transferase [Fusobacterium sp. | GI: 237742190 |
| 4_1_13] | (SEQ ID NO: 259) |
| 4-hydroxybutyrate coenzyme A transferase [Fusobacterium sp. 2_1_31] | ZP_08689706.1 |
| >ref\|ZP_16398352.1\|hypothetical protein FPOG_01423 [Fusobacterium | GI: 340752912 |
| periodonticum D10] >gb\|EEO37750.1\|4-hydroxybutyrate coenzyme A transferase | (SEQ ID NO: 260) |
| [Fusobacterium sp. 2_1_31] >gb\|EKA92776.1\|hypothetical protein FPOG_01423 | |
| [Fusobacterium periodonticum D10] | |
| 4-hydroxybutyrate CoA-transferase [Fusobacterium nucleatum ChDC F128] | ZP_15973607.1 |
| >gb\|EJU07208.1\|4-hydroxybutyrate CoA-transferase [Fusobacterium nucleatum | GI: 421527002 |
| ChDC F128] | (SEQ ID NO: 261) |
| 4-hydroxybutyrate CoA-transferase [Fusobacterium sp. 1_1_41FAA] | ZP_06747486.1 |
| >gb\|EFG28576.1\|4-hydroxybutyrate CoA-transferase [Fusobacterium sp. | GI: 294782160 |
| 1_1_41FAA] | (SEQ ID NO: 262) |
| 4-hydroxybutyrate CoA-transferase [Fusobacterium nucleatum subsp. fusiforme | ZP_15604676.1 |
| ATCC 51190] >gb\|EJG09667.1\|4-hydroxybutyrate CoA-transferase [Fusobacterium | GI: 421144770 |
| nucleatum subsp. fusiforme ATCC 51190] | (SEQ ID NO: 263) |
| hypothetical protein HMPREF9942_00351 [Fusobacterium nucleatum subsp. | ZP_17124213.1 |
| animalis F0419] >gb\|EHO79348.1\|hypothetical protein HMPREF9942_00351 | GI: 423136570 |
| [Fusobacterium nucleatum subsp. animalis F0419] | (SEQ ID NO: 264) |
| acetyl-CoA hydrolase [Fusobacterium nucleatum subsp. polymorphum ATCC 10953] | ZP_04971624.1 |
| >gb\|EDK89708.1\|acetyl-CoA hydrolase [Fusobacterium nucleatum subsp. | GI: 254304266 |
| polymorphum ATCC 10953] | (SEQ ID NO: 265) |
| acetyl-CoA hydrolase/transferase [Roseiflexus sp. RS-1] >gb\|ABQ89320.1\|acetyl- | YP_001275270.1 |
| CoA hydrolase/transferase [Roseiflexus sp. RS-1] | GI: 148655065 |
| | (SEQ ID NO: 266) |
| acetyl-CoA hydrolase/transferase [Porphyromonas asaccharolytica DSM 20707] | YP_004441567.1 |
| >gb\|AEE12399.1\|acetyl-CoA hydrolase/transferase [Porphyromonas asaccharolytica | GI: 332299646 |
| DSM 20707] | (SEQ ID NO: 267) |
| 4-hydroxybutyrate CoA-transferase [Fusobacterium nucleatum CC53] | EMP15468.1 |
| | GI: 465143275 |
| | (SEQ ID NO: 268) |
| butyryl:4-hydroxybutyrate CoA transferase [Geobacter bemidjiensis Bem] | YP_002138233.1 |
| >gb\|ACH38437.1\|butyryl:4-hydroxybutyrate coenzyme A transferase [Geobacter | GI: 197117806 |
| bemidjiensis Bem] | (SEQ ID NO: 269) |
| acetyl-CoA hydrolase [Fusobacterium sp. 3_1_36A2] >gb\|EEU32577.1\|acetyl-CoA | ZP_05550921.1 |
| hydrolase [Fusobacterium sp. 3_1_36A2] | GI: 256845463 |
| | (SEQ ID NO: 270) |
| 4-hydroxybutyrate CoA-transferase [Fusobacterium sp. 3_1_27] >gb\|EFG34309.1\|4- | ZP_06750521.1 |
| hydroxybutyrate CoA-transferase [Fusobacterium sp. 3_1_27] | GI: 294785233 |
| | (SEQ ID NO: 271) |
| 4-hydroxybutyrate CoA-transferase [Eubacterium yurii subsp. margaretiae ATCC | ZP_07455129.1 |
| 43715] >gb\|EFM38414.1\|4-hydroxybutyrate CoA-transferase [Eubacterium yurii | GI: 306821529 |
| subsp. margaretiae ATCC 43715] | (SEQ ID NO: 272) |
| acetyl-CoA hydrolase/transferase [Roseiflexus castenholzii DSM 13941] | YP_001433830.1 |
| >gb\|ABU59812.1\|acetyl-CoA hydrolase/transferase [Roseiflexus castenholzii DSM | GI: 156743701 |
| 13941] | (SEQ ID NO: 273) |
| 4-hydroxybutyrate coenzyme A transferase [Fusobacterium nucleatum subsp. | NP_603518.1 |
| nucleatum ATCC 25586] >ref\|ZP_06870070.1\|4-hydroxybutyrate CoA-transferase | GI: 19703956 |
| [Fusobacterium nucleatum subsp. nucleatum ATCC 23726] >gb\|AAL94817.1\|4- | (SEQ ID NO: 274) |
| hydroxybutyrate coenzyme A transferase [Fusobacterium nucleatum subsp. nucleatum | |
| ATCC 25586] >gb\|EFG96121.1\|4-hydroxybutyrate CoA-transferase [Fusobacterium | |
| nucleatum subsp. nucleatum ATCC 23726] | |
| 4-hydroxybutyrate coenzyme A transferase [Porphyromonas asaccharolytica | ZP_07821110.1 |
| PR426713P-I] >gb\|EFR33883.1\|4-hydroxybutyrate coenzyme A transferase | GI: 313887421 |
| [Porphyromonas asaccharolytica PR426713P-I] | (SEQ ID NO: 275) |
| 4-hydroxybutyrate CoA-transferase [Imtechella halotolerans K1] >gb\|EID75748.1\|4- | ZP_09999308.1 |
| hydroxybutyrate CoA-transferase [Imtechella halotolerans K1] | GI: 384098189 |
| | (SEQ ID NO: 276) |
| 4-hydroxybutyrate CoA-transferase [Fusobacterium nucleatum subsp. polymorphum | ZP_16420483.1 |
| F0401] >gb\|EHG18330.1\|4-hydroxybutyrate CoA-transferase [Fusobacterium | GI: 422339525 |
| nucleatum subsp. polymorphum F0401] | (SEQ ID NO: 277) |
| 4-hydroxybutyrate coenzyme A transferase [Eubacterium sp. AS15] >gb\|EJP19825.1\| | ZP_10829831.1 |
| 4-hydroxybutyrate coenzyme A transferase [Eubacterium sp. AS15] | GI: 402310872 |
| | (SEQ ID NO: 278) |
| acetyl-CoA hydrolase [Desulfosporosinus acidiphilus SJ4] >gb\|AFM41652.1\|acetyl- | YP_006466984.1 |
| CoA hydrolase [Desulfosporosinus acidiphilus SJ4] | GI: 392425990 |
| | (SEQ ID NO: 279) |
| putative butyryl-CoA:acetate CoA-transferase [Flavonifractor plautii ATCC 29863] | ZP_09385293.1 |
| >gb\|EHM42532.1\|putative butyryl-CoA:acetate CoA-transferase [Flavonifractor | GI: 365844447 |
| plautii ATCC 29863] | (SEQ ID NO: 280) |
| hypothetical protein CarbS_08493 [Clostridium arbusti SL206] | ZP_10774427.1 |
| | GI: 399888550 |
| | (SEQ ID NO: 281) |
| acetyl-CoA hydrolase/transferase [Clostridium carboxidivorans P7] | ZP_05395303.1 |
| >ref\|ZP_06857150.1\|acetyl-CoA hydrolase/transferase [Clostridium carboxidivorans | GI: 255528520 |
| P7] >gb\|EET84247.1\|acetyl-CoA hydrolase/transferase [Clostridium carboxidivorans | (SEQ ID NO: 282) |
| P7] >gb\|EFG86097.1\|acetyl-CoA hydrolase/transferase [Clostridium carboxidivorans | |
| P7] | |
| 4-hydroxybutyrate CoA-transferase [Tannerella forsythia ATCC 43037] | YP_005014371.1 |
| >gb\|AEW22101.1\|4-hydroxybutyrate coenzyme A transferase [Tannerella forsythia | GI: 375255204 |
| ATCC 43037] | (SEQ ID NO: 283) |
| acetyl-CoA hydrolase/transferase domain-containing protein [Anaerostipes sp. | ZP_07932276.1 |
| 3_2_56FAA] >gb\|EFV21594.1\|acetyl-CoA hydrolase/transferase domain-containing | GI: 317472972 |
| protein [Anaerostipes sp. 3_2_56FAA] | (SEQ ID NO: 284) |
| 4-hydroxybutyrate:acetyl-CoA transferase [Fusobacterium sp. 3_1_5R] | ZP_07924174.1 |
| >gb\|EFS22200.1\|4-hydroxybutyrate:acetyl-CoA transferase [Fusobacterium sp. | GI: 317059689 |
| 3_1_5R] | (SEQ ID NO: 285) |
| acetyl-CoA hydrolase/transferase [Geobacter sp. M21] >gb\|ACT18894.1\|acetyl-CoA | YP_003022652.1 |
| hydrolase/transferase [Geobacter sp. M21] | GI: 253701463 |
| | (SEQ ID NO: 286) |
| acetyl-CoA hydrolase [Desulfosporosinus acidiphilus SJ4] >gb\|AFM40672.1\|acetyl- | YP_006466004.1 |
| CoA hydrolase [Desulfosporosinus acidiphilus SJ4] | GI: 392425010 |
| | (SEQ ID NO: 287) |
| hypothetical protein CKL_3018 [Clostridium kluyveri DSM 555] | YP_001396397.1 |
| >ref\|YP_002473131.1\|hypothetical protein CKR_2666 [Clostridium kluyveri NBRC | GI: 153955632 |
| 12016] >sp\|P38942.3\|CAT2_CLOK5 RecName: Full = 4-hydroxybutyrate coenzyme | (SEQ ID NO: 288) |
| A transferase >gb\|EDK35026.1\|Cat2 [Clostridium kluyveri DSM 555] | |
| >dbj\|BAH07717.1\|hypothetical protein [Clostridium kluyveri NBRC 12016] | |
| LOW QUALITY PROTEIN: acetyl-CoA hydrolase [Thermoanaerobacter | ZP_10305985.1 |
| siderophilus SR4] >gb\|EIW00535.1\|LOW QUALITY PROTEIN: acetyl-CoA | GI: 392940341 |
| hydrolase [Thermoanaerobacter siderophilus SR4] | (SEQ ID NO: 289) |
| 4-hydroxybutyrate:acetyl-CoA transferase [Fusobacterium gonidiaformans ATCC | ZP_07914775.1 |
| 25563] >ref\|ZP_07924054.1\|4-hydroxybutyrate:acetyl-CoA transferase | GI: 315918535 |
| [Fusobacterium sp. 3_1_5R] >gb\|EFS22080.1\|4-hydroxybutyrate:acetyl-CoA | (SEQ ID NO: 290) |
| transferase [Fusobacterium sp. 3_1_5R] >gb\|EFS29245.1\|4-hydroxybutyrate:acetyl- | |
| CoA transferase [Fusobacterium gonidiaformans ATCC 25563] | |
| 4-hydroxybutyrate coenzyme A transferase [Fusobacterium varium ATCC 27725] | ZP_08693772.1 |
| >gb\|EES63001.1\|4-hydroxybutyrate coenzyme A transferase [Fusobacterium varium | GI: 340757169 |
| ATCC 27725] | (SEQ ID NO: 291) |
| 4-hydroxybutyrate coenzyme A transferase [Fusobacterium necrophorum subsp. | ZP_14365187.1 |
| funduliforme ATCC 51357] >gb\|EIJ68663.1\|4-hydroxybutyrate coenzyme A | GI: 419841825 |
| transferase [Fusobacterium necrophorum subsp. funduliforme ATCC 51357] | (SEQ ID NO: 292) |
| hypothetical protein ANACAC_00165 [Anaerostipes caccae DSM 14662] | ZP_02417601.1 |
| >gb\|EDR99324.1\|4-hydroxybutyrate coenzyme A transferase [Anaerostipes caccae | GI: 167745474 |
| DSM 14662] | (SEQ ID NO: 293) |
| 4-hydroxybutyrate coenzyme A transferase [Clostridium sp. MSTE9] | ZP_14664473.1 |
| >gb\|EJF39044.1\|4-hydroxybutyrate coenzyme A transferase [Clostridium sp. | GI: 420157643 |
| MSTE9] | (SEQ ID NO: 294) |
| hypothetical protein ANASTE_01215 [Anaerofustis stercorihominis DSM 17244] | ZP_02862002.1 |
| >gb\|EDS71513.1\|4-hydroxybutyrate coenzyme A transferase [Anaerofustis | GI: 169334809 |
| stercorihominis DSM 17244] | (SEQ ID NO: 295) |
| 4-hydroxybutyrate CoA-transferase [Anaerostipes caccae] | ABA39275.1 |
| | GI: 76096774 |
| | (SEQ ID NO: 296) |
| 4-Hydroxybutyrate CoA-transferase [Clostridium aminobutyricum]. | CAB60036 |
| | GI: 188032706 |
| | (SEQ ID NO: 297) |
| 4-Hydroxybutyrate CoA-transferase [Clostridium aminobutyricum] | CAB60036.2 |
| | GI: 188032706 |
| | (SEQ ID NO: 298) |
| Chain A, Crystal Structure Of 4-Hydroxybutyrate Coa-Transferase From Clostridium | 3GK7_A |
| Aminobutyricum >pdb\|3GK7\|B Chain B, Crystal Structure Of 4-Hydroxybutyrate | GI: 281500759 |
| Coa-Transferase From Clostridium Aminobutyricum >pdb\|3QDQ\|A Chain A, | (SEQ ID NO: 299) |
| Complex Between 4-Hydroxybutyrate Coa-Transferase From Clostridium | |
| Aminobutyricum And Coa | |
| 4-hydroxybutyrate CoA-transferase [Eubacterium saphenum ATCC 49989] | ZP_05427217.1 |
| >gb\|EEU03839.1\|4-hydroxybutyrate CoA-transferase [Eubacterium saphenum | GI: 255994082 |
| ATCC 49989] | (SEQ ID NO: 300) |
| putative butyryl-CoA:acetate CoA-transferase [Clostridium difficile 002-P50-2011] | ZP_17072579.1 |
| >ref\|ZP_17075260.1\|putative butyryl-CoA:acetate CoA-transferase [Clostridium | GI: 423084074 |
| difficile 050-P50-2011] >gb\|EHJ25154.1\|putative butyryl-CoA:acetate CoA- | (SEQ ID NO: 301) |
| transferase [Clostridium difficile 002-P50-2011] >gb\|EHJ27941.1\|putative butyryl- | |
| CoA:acetate CoA-transferase [Clostridium difficile 050-P50-2011] | |
| 4-hydroxybutyrate CoA-transferase [Clostridium difficile 630] >ref\|ZP_05272394.1\| | YP_001088854.1 |
| 4-hydroxybutyrate CoA transferase [Clostridium difficile QCD-66c26] | GI: 126699957 |
| >ref\|ZP_05322787.1\|4-hydroxybutyrate CoA transferase [Clostridium difficile CIP | (SEQ ID NO: 302) |
| 107932] >ref\|ZP_05330465.1\|4-hydroxybutyrate CoA transferase [Clostridium | |
| difficile QCD-63q42] >ref\|ZP_05356638.1\|4-hydroxybutyrate CoA transferase | |
| [Clostridium difficile QCD-76w55] >ref\|ZP_05385401.1\|4-hydroxybutyrate CoA | |
| transferase [Clostridium difficile QCD-97b34] >ref\|ZP_05397740.1\|4- | |
| hydroxybutyrate CoA transferase [Clostridium difficile QCD-37x79] | |
| >ref\|YP_003215203.1\|4-hydroxybutyrate CoA transferase [Clostridium difficile | |
| CD196] >ref\|YP_003218712.1\|4-hydroxybutyrate CoA transferase [Clostridium | |
| difficile R20291] >ref\|ZP_07407078.1\|4-hydroxybutyrate CoA transferase | |
| [Clostridium difficile QCD-32g58] >ref\|YP_006199406.1\|4-hydroxybutyrate CoA | |
| transferase [Clostridium difficile BI1] >ref\|ZP_17080166.1\|putative butyryl- | |
| CoA:acetate CoA-transferase [Clostridium difficile 70-100-2010] >emb\|CAJ69226.1\| | |
| 4-hydroxybutyrate CoA transferase [Clostridium difficile 630] >emb\|CBA64187.1\|4- | |
| hydroxybutyrate CoA transferase [Clostridium difficile CD196] >emb\|CBE05384.1\| | |
| 4-hydroxybutyrate CoA transferase [Clostridium difficile R20291] >gb\|EHJ35600.1\| | |
| putative butyryl-CoA:acetate CoA-transferase [Clostridium difficile 70-100-2010] | |
| 4-hydroxybutyrate CoA transferase [Clostridium difficile ATCC 43255] | ZP_05351533.1 |
| | GI: 255307362 |
| | (SEQ ID NO: 303) |
| 4-hydroxybutyrate CoA transferase [Clostridium difficile QCD-23m63] | ZP_05401721.1 |
| >ref\|ZP_06892006.1\|4-hydroxybutyrate CoA-transferase [Clostridium difficile | GI: 255656312 |
| NAP08] >ref\|ZP_06902665.1\|4-hydroxybutyrate CoA-transferase [Clostridium | (SEQ ID NO: 304) |
| difficile NAP07] >gb\|EFH07842.1\|4-hydroxybutyrate CoA-transferase [Clostridium | |
| difficile NAP08] >gb\|EFH16309.1\|4-hydroxybutyrate CoA-transferase [Clostridium | |
| difficile NAP07] | |
| 4-hydroxybutyrate coenzyme A transferase [Clostridium sp. MSTE9] | ZP_14663205.1 |
| >gb\|EJF40677.1\|4-hydroxybutyrate coenzyme A transferase [Clostridium sp. | GI: 420156362 |
| MSTE9] | (SEQ ID NO: 305) |
| hypothetical protein CarbS_12961 [Clostridium arbusti SL206] | ZP_10775305.1 |
| | GI: 399889428 |
| | (SEQ ID NO: 306) |
| hypothetical protein HMPREF0995_05302 [Lachnospiraceae bacterium | ZP_09534466.1 |
| 7_1_58FAA] >gb\|EHO23268.1\|hypothetical protein HMPREF0995_05302 | GI: 373120404 |
| [Lachnospiraceae bacterium 7_1_58FAA] | (SEQ ID NO: 307) |
| hypothetical protein HMPREF0995_04657 [Lachnospiraceae bacterium | ZP_09533821.1 |
| 7_1_58FAA] >gb\|EHO27239.1\|hypothetical protein HMPREF0995_04657 | GI: 373119730 |
| [Lachnospiraceae bacterium 7_1_58FAA] | (SEQ ID NO: 308) |
| acetyl-CoA hydrolase/transferase [Clostridium beijerinckii NCIMB 8052] | YP_001309226.1 |
| >gb\|ABR34270.1\|acetyl-CoA hydrolase/transferase [Clostridium beijerinckii NCIMB | GI: 150016972 |
| 8052] | (SEQ ID NO: 309) |
| 4-hydroxybutyrate coenzyme A transferase [Clostridium kluyveri DSM 555] | AAA92344.1 |
| | GI: 1228101 |
| | (SEQ ID NO: 310) |
| acetyl-CoA hydrolase/transferase [Odoribacter splanchnicus DSM 20712] | YP_004253244.1 |
| >gb\|ADY33064.1\|acetyl-CoA hydrolase/transferase [Odoribacter splanchnicus DSM | GI: 325280702 |
| 20712] | (SEQ ID NO: 311) |
| 4-hydroxybutyrate CoA-transferase [Porphyromonas gingivalis ATCC 33277] | YP_001928841.1 |
| >dbj\|BAG33244.1\|4-hydroxybutyrate CoA-transferase [Porphyromonas gingivalis | GI: 188994589 |
| ATCC 33277] | (SEQ ID NO: 312) |
| hypothetical protein FUAG_02467 [Fusobacterium ulcerans ATCC 49185] | ZP_10973595.1 |
| >gb\|EFS26952.1\|hypothetical protein FUAG_02467 [Fusobacterium ulcerans ATCC | GI: 404368238 |
| 49185] | (SEQ ID NO: 313) |
| 4-hydroxybutyrate CoA-transferase [Fusobacterium sp. 11_3_2] >gb\|EGN63583.1\|4- | ZP_08598358.1 |
| hydroxybutyrate CoA-transferase [Fusobacterium sp. 11_3_2] | GI: 336418079 |
| | (SEQ ID NO: 314) |
| 4-hydroxybutyrate CoA-transferase [Fusobacterium nucleatum CC53] | EMP16460.1 |
| | GI: 465144883 |
| | (SEQ ID NO: 315) |
| 4-hydroxybutyrate:acetyl-CoA CoA transferase [Fusobacterium nucleatum subsp. | ZP_00144049.1 |
| vincentii ATCC 49256] >gb\|EAA24344.1\|4-hydroxybutyrate:acetyl-CoA CoA | GI: 34763077 |
| transferase [Fusobacterium nucleatum subsp. vincentii ATCC 49256] | (SEQ ID NO: 316) |
| 4-hydroxybutyrate coenzyme A transferase [Fusobacterium sp. D12] | ZP_08691841.1 |
| >ref\|ZP_09528784.1\|hypothetical protein HMPREF9466_02817 [Fusobacterium | GI: 340755139 |
| necrophorum subsp. funduliforme 1_1_36S] >ref\|ZP_15946533.1\|4-hydroxybutyrate | (SEQ ID NO: 317) |
| coenzyme A transferase [Fusobacterium necrophorum subsp. funduliforme Fnf 1007] | |
| >gb\|EFS22986.1\|4-hydroxybutyrate coenzyme A transferase [Fusobacterium sp. | |
| D12] >gb\|EHO16876.1\|hypothetical protein HMPREF9466_02817 [Fusobacterium | |
| necrophorum subsp. funduliforme 1_1_36S] >gb\|EJU18967.1\|4-hydroxybutyrate | |
| coenzyme A transferase [Fusobacterium necrophorum subsp. funduliforme Fnf 1007] | |
| TDC60] >dbj\|BAK25964.1\|4-hydroxybutyrate CoA-transferase [Porphyromonas | YP_004510530.1 |
| gingivalis TDC60] | GI: 334147601 |
| | (SEQ ID NO: 318) |
| 4-hydroxybutyrate CoA-transferase [Porphyromonas gingivalis W83] | NP_904965.1 |
| >ref\|ZP_14485385.1\|4-hydroxybutyrate coenzyme A transferase [Porphyromonas | GI: 34540486 |
| gingivalis W50] >gb\|AAQ65864.1\|4-hydroxybutyrate CoA-transferase | (SEQ ID NO: 319) |
| [Porphyromonas gingivalis W83] >gb\|EIW94739.1\|4-hydroxybutyrate coenzyme A | |
| transferase [Porphyromonas gingivalis W50] | |
| hypothetical protein CKL_3595 [Clostridium kluyveri DSM 555] | YP_001396957.1 |
| >ref\|YP_002473639.1\|hypothetical protein CKR_3174 [Clostridium kluyveri NBRC | GI: 153956192 |
| 12016] >gb\|EDK35586.1\|Cat3 [Clostridium kluyveri DSM 555] >dbj\|BAH08225.1\| | (SEQ ID NO: 320) |
| hypothetical protein [Clostridium kluyveri NBRC 12016] | |
| hypothetical protein HMPREF0402_00217 [Fusobacterium sp. 12_1B] | ZP_09586344.1 |
| >gb\|EHO84398.1\|hypothetical protein HMPREF0402_00217 [Fusobacterium sp. | GI: 373495791 |
| 12_1B] | (SEQ ID NO: 321) |
| 4-hydroxybutyrate:acetyl-CoA transferase [Fusobacterium sp. 4_1_13] | ZP_04572117.1 |
| >ref\|ZP_06751042.1\|4-hydroxybutyrate CoA-transferase [Fusobacterium sp. 3_1_27] | GI: 237741636 |
| >gb\|EEO39496.1\|4-hydroxybutyrate:acetyl-CoA transferase [Fusobacterium sp. | (SEQ ID NO: 322) |
| 4_1_13] >gb\|EFG34830.1\|4-hydroxybutyrate CoA-transferase [Fusobacterium sp. | |
| 3_1_27] | |
| 4-hydroxybutyrate CoA-transferase [Clostridium tetani E88] >gb\|AAO35111.1\|4- | NP_781174.1 |
| hydroxybutyrate coenzyme A transferase [Clostridium tetani E88] | GI: 28210230 |
| | (SEQ ID NO: 323) |
| 4-hydroxybutyrate:acetyl-CoA transferase [Fusobacterium sp. 3_1_36A2] | ZP_05550423.1 |
| >gb\|EEU32079.1\|4-hydroxybutyrate:acetyl-CoA transferase [Fusobacterium sp. | GI: 256844965 |
| 3_1_36A2] | (SEQ ID NO: 324) |
| 4-hydroxybutyrate CoA-transferase [Filifactor alocis ATCC 35896] >gb\|EFE28990.1\| | YP_005055048.1 |
| 4-hydroxybutyrate CoA-transferase [Filifactor alocis ATCC 35896] | GI: 374308617 |
| | (SEQ ID NO: 325) |
| 4-hydroxybutyrate CoA-transferase [Bacteroidetes oral taxon 274 str. F0058] | ZP_06983177.1 |
| >gb\|EFI17642.1\|4-hydroxybutyrate CoA-transferase [Bacteroidetes oral taxon 274 str. | GI: 298373187 |
| F0058] | (SEQ ID NO: 326) |
| 4-hydroxybutyrate coenzyme A transferase [Clostridium sp. 7_3_54FAA] | ZP_09046738.1 |
| >gb\|EHF07225.1\|4-hydroxybutyrate coenzyme A transferase [Clostridium sp. | GI: 355622639 |
| 7_3_54FAA] | (SEQ ID NO: 327) |
| 4-hydroxybutyrate coenzyme A transferase [Porphyromonas endodontalis ATCC | ZP_04389695.1 |
| 35406] >gb\|EEN82972.1\|4-hydroxybutyrate coenzyme A transferase | GI: 229495971 |
| [Porphyromonas endodontalis ATCC 35406] | (SEQ ID NO: 328) |
| acetyl-CoA hydrolase/transferase [Megasphaera elsdenii DSM 20460] | YP_004765391.1 |
| >emb\|CCC72564.1\|acetyl-CoA hydrolase/transferase [Megasphaera elsdenii DSM | GI: 348025587 |
| 20460] | (SEQ ID NO: 329) |
| acetyl-CoA hydrolase/transferase [Desulfatibacillum alkenivorans AK-01] | YP_002430388.1 |
| >gb\|ACL02920.1\|acetyl-CoA hydrolase/transferase [Desulfatibacillum alkenivorans | GI: 218779070 |
| AK-01] | (SEQ ID NO: 330) |
| 4-hydroxybutyrate CoA-transferase [Peptoniphilus indolicus ATCC 29427] | ZP_08935544.1 |
| >gb\|EGY77354.1\|4-hydroxybutyrate CoA-transferase [Peptoniphilus indolicus | GI: 350566925 |
| ATCC 29427] | (SEQ ID NO: 331) |
| acetyl-CoA hydrolase/transferase [Desulfitobacterium metallireducens DSM 15288] | ZP_08976459.1 |
| >gb\|EHC20214.1\|acetyl-CoA hydrolase/transferase [Desulfitobacterium | GI: 354557200 |
| metallireducens DSM 15288] | (SEQ ID NO: 332) |
| acetyl-CoA hydrolase/transferase [Acetonema longum DSM 6540] >gb\|EGO65184.1\| | ZP_08623452.1 |
| acetyl-CoA hydrolase/transferase [Acetonema longum DSM 6540] | GI: 338811223 |
| | (SEQ ID NO: 333) |
| Chain A, The Structure Of A Putative 4-Hydroxybutyrate Coa-Transferase From | 3EH7_A |
| Porphyromonas Gingivalis W83 | GI: 217035437 |
| | (SEQ ID NO: 334) |
| acetyl-CoA hydrolase/transferase [Clostridium symbiosum WAL-14163] | ZP_08089122.1 |
| >gb\|EGA95251.1\|acetyl-CoA hydrolase/transferase [Clostridium symbiosum WAL- | GI: 323483742 |
| 14163] | (SEQ ID NO: 335) |
| acetyl-CoA hydrolase/transferase [Megasphaera genomosp. type_1 str. 28L] | ZP_06559383.1 |
| >ref\|ZP_08542966.1\|putative butyryl-CoA:acetate CoA-transferase [Megasphaera sp. | GI: 290967830 |
| UPII 199-6] >gb\|EFD94764.1\|acetyl-CoA hydrolase/transferase [Megasphaera | (SEQ ID NO: 336) |
| genomosp. type_1 str. 28L] >gb\|EGL39418.1\|putative butyryl-CoA:acetate CoA- | |
| transferase [Megasphaera sp. UPII 199-6] | |
| acetyl-CoA hydrolase/transferase [Syntrophothermus lipocalidus DSM 12680] | YP_003702013.1 |
| >gb\|ADI01448.1\|acetyl-CoA hydrolase/transferase [Syntrophothermus lipocalidus | GI: 297616854 |
| DSM 12680] | (SEQ ID NO: 337) |
| acetyl-CoA hydrolase/transferase [Clostridium symbiosum WAL-14673] | ZP_08106938.1 |
| >gb\|EGB19096.1\|acetyl-CoA hydrolase/transferase [Clostridium symbiosum WAL- | GI: 323692709 |
| 14673] | (SEQ ID NO: 338) |

[0830] Table 54 provides exemplary cat2 enzyme variants. Table 54 shows exemplary enzyme variant positions with the corresponding amino acid for a particular position that were identified as providing a desirable activity, including cat2 activity, BDO production, and the like. It is understood that the individual cat2 variants such as those described in Table 54 can be used alone, or can be combined with any other variant amino acid position, as disclosed herein, including 2, 3, 4, 5, 6, 7, 8, 9, 10, greater than 10 and up to all variant amino acid positions to generate additional variants having desirable activities.

TABLE 54
Exemplary cat2 enzyme variants.

| Wild-Type Designation | Wild-Type Sequence | | Corresponding | Exemplary Enzyme | |
|---|---|---|---|---|---|
| and Amino Acid Changes | Corresponding Positions | | Positions | Sequence Indicating | |
| 4-hydroxybutyrate | 1 | MQWQELYRQR VCSADEAVVD | 30L, 32G, 34A, | 1 | MQWQELYRQR VCSADEAVVD |
| CoA-transferase | | SLKPGTKVVF GHAAAAPVRF | 58Q, 108Y, 232R, | | SLKPGTKVVL GGAAAAPVRF |
| [Porphyromonas | | SQAMYRQREK LENITVFHML | 312S, 314V, 332Y | | SQAMYRQREK LENITVFQML |
| gingivalis W83] | 61 | YFGDAPHLAP EMRSHVHPTL | | 61 | YFGDAPHLAP EMRSHVHPTL |
| VERSION: NP_906037.1 | | NFLEGNSRPA SRDRRVDFIP | | | NFLEGNSRPA SRDRRVDFIP |
| GI: 34541558 | | CHFHEVPELF RQGFFPLDVA | | | CHFHEVPYLF RQGFFPLDVA |
| | 121 | VVQVSTPNEE GYCSFGVSCD | | 121 | VVQVSTPNEE GYCSFGVSCD |
| | | YTKAAAECAP VVVAEVNKQM | | | YTKAAAECAP VVVAEVNKQM |
| | | PFIGGENLIH ISKLTHIIEV | | | PFIGGENLIH ISKLTHIIEV |
| | 181 | DEPIAEVLPP AISDLELRIG | | 181 | DEPIAEVLPP AISDLELRIG |
| | | QNCASLIKDG DTLQLGIGGI | | | QNCASLIKDG DTLQLGIGGI |
| | | PDAVLRALEG HKDLGIHTEM | | | PDAVLRALEG HRDLGIHTEM |
| | 241 | FTDGVMRMIR KGIINGKKKT | | 241 | FTDGVMRMIR KGIINGKKKT |
| | | LHPEKVVTSL IFGSKELYDF | | | LHPEKVVTSL IFGSKELYDF |
| | | VNNNPVIECY PVDYINNPDV | | | VNNNPVIECY PVDYINNPDV |
| | 301 | IGKNDRMVSI NSCLEMDLMG | | 301 | IGKNDRMVSI NSCVEMDLMG |
| | | QAASESIGYE QFSGSGGQVD | | | QAASESIGYE QYSGSGGQVD |
| | | FLRGAKRSKG GISIMAFPST | | | FLRGAKRSKG GISIMAFPST |
| | 361 | AKKGTESRIV PILKEGACVT | | 361 | AKKGTESRIV PILKEGACVT |
| | | TGRNEVDYVV TEYGVARLRG | | | TGRNEVDYVV TEYGVARLRG |
| | | ATLRQRAEAL TAIAHPDFRP | | | ATLRQRAEAL TAIAHPDFRP |
| | 421 | ALEEEIRRRF E | | 421 | ALEEEIRRRF E |
| | | (SEQ ID NO: 188) | | | (SEQ ID NO: 199) |
| acetyl-CoA | 1 | MPRSLTAGRR EMTAEEAVEL | 29L, 31G, 33A, | 1 | MPRSLTAGRR EMTAEEAVEL |
| hydrolase/transferase | | IESNHRVYIG GGCGVPIPLL | 57Q, 107Y, 231R, | | IESNHRVYLG HGAGVPIPLL |
| [Roseiflexus | | DALVARAPEL RNVEIIHMLT | 311S, 313V, 331Y | | DALVARAPEL RNVEIIQMLT |
| castenholzii | 61 | AGEDPTTAPE LAASFRHNAL | | 61 | AGEDPTTAPE LAASFRHNAL |
| DSM 13941] | | FIGHNTRRAV NEGRADFTPI | | | FIGHNTRRAV NEGRADFTPI |
| Sequence ID: | | FLGEIPKLFR QGILPLDVAM | | | FLGEIPYLFR QGILPLDVAM |
| ref\|YP_001433830.1\| | 121 | IQVSPPDRHG FCSLGVEVGC | | 121 | IQVSPPDRHG FCSLGVEVGC |
| Length: 431 | | TLPAARTAKI VIAEVNARMP | | | TLPAARTAKI VIAEVNARMP |
| | | RTLGDSFIHI SRLTALVESD | | | RTLGDSFIHI SRLTALVESD |
| | 181 | RPLLELPQGE TNSVAQAIGR | | 181 | RPLLELPQGE TNSVAQAIGR |
| | | HIAELIPDGA TLQLGIGAIP | | | HIAELIPDGA TLQLGIGAIP |
| | | DAVLSNLHGK RHLGIHTELF | | | DAVLSNLHGK RHLGIHTELF |
| | 241 | SDGVIDLVEA GVIDGELKTI | | 241 | SDGVIDLVEA GVIDGELKTI |
| | | HQGKVVAGFI LGSQRCFDWA | | | HQGKVVAGFI LGSQRCFDWA |
| | | HNNAMVEMHP TDYVNDPFVI | | | HNNAMVEMHP TDYVNDPFVI |
| | 301 | AQHKNMVAVN SALQVDLTGQ | | 301 | AQHKNMVAVN SAVQVDLTGQ |
| | | VCADSIGTRL YSGVGGQVDF | | | VCADSIGTRL YSGVGGQVDF |
| | | IRGASRSEGG IPIIAISSTA | | | IRGASRSEGG IPIIAISSTA |
| | 361 | RDGTISRIVP TLDVGAGVVT | | 361 | RDGTISRIVP TLDVGAGVVT |
| | | SRYDVHFVVT EYGVADLYGR | | | SRYDVHFVVT EYGVADLYGR |
| | | TLAQRARALI NIAHPAFRDQ | | | TLAQRARALI NIAHPAFRDQ |
| | 421 | LTEAAKKLHY I | | 421 | LTEAAKKLHY I |
| | | (SEQ ID NO: 189) | | | (SEQ ID NO: 200) |
| hypothetical protein | 1 | MNWQEEYKRR LCSAEEAVQH | 29L, 31G, 33A, | 1 | MNWQEEYKRR LCSAEEAVQH |
| HMPREF0995_05302 | | IHSGDTVFLG HAVAESSLLV | 57Q, 107Y, 230R, | | IHSGDTVFLG GAAAESSLLV |
| [Lachnospiraceae | | DAMVQNATAY QDVRIIHMTN | 310S, 312V, 330Y | | DAMVQNATAY QDVRIIQMTN |
| bacterium 7_1_58FAA] | 61 | LGSGAYTQPG MESHFHVSPF | | 61 | LGSGAYTQPG MESHFHVSPF |
| Sequence ID: | | FLGATVRAAV AEGRGDFIPC | | | FLGATVRAAV AEGRGDFIPC |
| ref\|ZP_09534466.1\| | | FFHEIPQLIR ERRVPCDVLM | | | FFHEIPYLIR ERRVPCDVLM |
| Length: 436 | 121 | TQVSPSDEKG YCSLGVSADY | | 121 | TQVSPSDEKG YCSLGVSADY |
| | | TYQALKSART VIAHVNDQYP | | | TYQALKSART VIAHVNDQYP |
| | | YTFGTKVHVT ELDYIVEQSA | | | YTFGTKVHVT ELDYIVEQSA |
| | 181 | PLYESKPPKI GEVEEKIGRC | | 181 | PLYESKPPKI GEVEEKIGRC |
| | | CASLIRDGAT LQLGIGAIPD | | | CASLIRDGAT LQLGIGAIPD |
| | | AVMMFLGDKH DLGIHSEMIS | | | AVMMFLGDKR DLGIHSEMIS |
| | 241 | DGTMELYQKG VITNQRKNLD | | 241 | DGTMELYQKG VITNQRKNLD |
| | | RGKMTITFAM GTKKLYQFLD | | | RGKMTITFAM GTKKLYQFLD |
| | | KNPDVLVKPV DYVNHPVTIM | | | KNPDVLVKPV DYVNHPVTIM |
| | 301 | KEHDMISINS AIQVDLQGQV | | 301 | KEHDMISINS AVQVDLQGQV |
| | | DAEAIGLRQF SGVGGQVDFI | | | DAEAIGLRQY SGVGGQVDFI |
| | | RGAAMGGGTS IIAMPSTTQK | | | RGAAMGGGTS IIAMPSTTQK |
| | 361 | KDGTLISKIV PFLDQGAPVT | | 361 | KDGTLISKIV PFLDQGAPVT |
| | | TSRNDVDYII TEYGIAHLKG | | | TSRNDVDYII TEYGIAHLKG |
| | | ETLRDRAWAL ISISHPSVRD | | | ETLRDRAWAL ISISHPSVRD |
| | 421 | SLAEEFERRF HQNYRA | | 421 | SLAEEFERRF HQNYRA |
| | | (SEQ ID NO: 190) | | | (SEQ ID NO: 201) |
| 4-hydroxybutyrate | 1 | MSKNWREVYK DKIVTADEAV | 31L, 33G, 35A, | 1 | MSKNWREVYK DKIVTADEAV |
| coenzyme A transferase | | KQIKSGDRLI FSHACGEAQE | 59Q, 109Y, 234R | | KQIKSGDRLI LSGAAGEAQE |
| [Fusobacterium | | ITDALLRNKE SYEKVEIIHL | 314S, 316V, 334Y | | ITDALLRNKE SYEKVEIIQL |
| necrophorum subsp. | 61 | VPMGKGEYAQ EENQKYFYHN | | 61 | VPMGKGEYAQ EENQKYFYHN |
| funduliforme ATCC | | SFFGGGSTRK AINGTYGDFT | | | SFFGGGSTRK AINGTYGDFT |
| 51357] | | PSFFFEIPNL FRKNGKLPLD | | | PSFFFEIPYL FRKNGKLPLD |
| Sequence ID: | 121 | VAIIQVSAPD EHGYCSYGIS | | 121 | VAIIQVSAPD EHGYCSYGIS |
| ref\|ZP_14365187.1\| | | CDYTKGAAEN AKIVIAQVNK | | | CDYTKGAAEN AKIVIAQVNK |
| Length: 436 | | YMPRTLGENF THLSAIDSIV | | | YMPRTLGENF THLSAIDSIV |
| | 181 | EYDQPILQLN PPKIGEVEKK | | 181 | EYDQPILQLN PPKIGEVEKK |
| | | IGEYCAGLIQ DGDTLQLGIG | | | IGEYCAGLIQ DGDTLQLGIG |
| | | AIPDAVLTFL KEKKHLGIHS | | | AIPDAVLTFL KEKRHLGIHS |
| | 241 | EMISDGVVDL ILAGVIDNSQ | | 241 | EMISDGVVDL ILAGVIDNSQ |
| | | KTIHKNKCIV SFLMGSQKLY | | | KTIHKNKCIV SFLMGSQKLY |
| | | DYVHNNPGVE LYPVDYVNHP | | | DYVHNNPGVE LYPVDYVNHP |
| | 301 | FVIAQNDNMV SINSALQVDL | | 301 | FVIAQNDNMV SINSAVQVDL |
| | | MGQVNAESMG AKQFSGTGGQ | | | MGQVNAESMG AKQYSGTGGQ |
| | | VDFVRGAAMS KGGRSIIAMP | | | VDFVRGAAMS KGGRSIIAMP |
| | 361 | STAAKGTISK IVMNLDVGAT | | 361 | STAAKGTISK IVMNLDVGAT |
| | | VTTSRNDVDY IITEYGIAEL | | | VTTSRNDVDY IITEYGIAEL |
| | | KGKTLRERAK ALIAIAHPDF | | | KGKTLRERAK ALIAIAHPDF |
| | 421 | REQLTKQALE KFQRLE | | 421 | REQLTKQALE KFQRLE |
| | | (SEQ ID NO: 191) | | | (SEQ ID NO: 202) |
| 4-hydroxybutyrate | 1 | MEWEEIYKEK LVTAEKAVSK | 29L, 31G, 33A, | 1 | MEWEEIYKEK LVTAEKAVSK |
| coenzyme A transferase | | IENHSRVVFA HAVGEPVDLV | 57Q, 107Y, 231R, | | IENHSRVVLA GAAGEPVDLV |
| [Clostridium kluyveri | | NALVKNKDNY IGLEIVHMVA | 311S, 313V, 331Y | | NALVKNKDNY IGLEIVQMVA |
| DSM 555] | 61 | MGKGVYTKEG MQRHFRHNAL | | 61 | MGKGVYTKEG MQRHFRHNAL |
| Sequence ID: | | FVGGSTRDAV NSGRAVYTPC | | | FVGGSTRDAV NSGRAVYTPC |
| gb\|AAA92344.1\| | | FFYEVPSLFK EKRLPVDVAL | | | FFYEVPYLFK EKRLPVDVAL |
| Length: 429 | 121 | IQVSEPDKYG YCSFGVSNDY | | 121 | IQVSEPDKYG YCSFGVSNDY |
| | | TKPAAESAKL VIAEVNKNMP | | | TKPAAESAKL VIAEVNKNMP |
| | | RTLGDSFIHV SDIDYIVEAS | | | RTLGDSFIHV SDIDYIVEAS |
| | 181 | HPLLELQPPK LGDVEKAIGE | | 181 | HPLLELQPPK LGDVEKAIGE |
| | | NCASLIEDGA TLQLGIGAIP | | | NCASLIEDGA TLQLGIGAIP |
| | | DAVLLFLKNK KNLGIHSEMI | | | DAVLLFLKNK RNLGIHSEMI |
| | 241 | SDGVMELVKA GVINNKKKTL | | 241 | SDGVMELVKA GVINNKKKTL |
| | | HPGKIVVTFL MGTKKLYDFV | | | HPGKIVVTFL MGTKKLYDFV |
| | | NNNPMVETYS VDYVNNPLVI | | | NNNPMVETYS VDYVNNPLVI |
| | 301 | MKNDNMVSIN SCVQVDLMGQ | | 301 | MKNDNMVSIN SCVQVDLMGQ |
| | | VCSESIGLKQ ISGVGGQVDF | | | VCSESIGLKQ YSGVGGQVDF |
| | | IRGANLSKGG KAIIAIPSTA | | | IRGANLSKGG KAIIAIPSTA |
| | 361 | GKGKVSRITP LLDTGAAVTT | | 361 | GKGKVSRITP LLDTGAAVTT |
| | | SRNEVDYVVT EYGVAHLKGK | | | SRNEVDYVVT EYGVAHLKGK |
| | | TLRNRARALI NIAHPKFRES | | | TLRNRARALI NIAHPKFRES |
| | 421 | LMNEFKKRF | | 421 | LMNEFKKRF |
| | | (SEQ ID NO: 192) | | | (SEQ ID N0: 203) |
| 4-Hydroxybutyrate | 1 | MDWKKIYEDR TCTADEAVKS | 29L, 31G, 33A, | 1 | MDWKKIYEDR TCTADEAVKS |
| CoA-transferase | | IKSGDRVLFA HCVAEPPVLV | 57Q, S107Y, 231R, | | IKSGDRVLLA GCAAEPPVLV |
| [Clostridium | | EAMVANAAAY KNVTVSQMVT | 311S, 313V, 331Y | | EAMVANAAAY KNVTVSQMVT |
| acetobutyricum] | 61 | LGKGEYSKPE YKENFTFEGW | | 61 | LGKGEYSKPE YKENFTFEGW |
| | | FTSPSTRGSI AEGHGQFVPV | | | FTSPSTRGSI AEGHGQFVPV |
| | | FFHEVPSLIR KDIFHVDVFM | | | FFHEVPYLIR KDIFHVDVFM |
| | 121 | MVSPPDHNGF CCVGVSSDYT | | 121 | VMVSPPDHNG FCCVGVSSDY |
| | | MQAIKSAKIV LAEVNDQVPV | | | TMQAIKSAKI VLAEVNDQVP |
| | | VYGDTFVHVS EIDKFVETSH | | | VVYGDTFVHV SEIDKFVETS |
| | 181 | PLPEIGLPKI GEVEAAIGKH | | 181 | HPLPEIGLPK IGEVEAAIGK |
| | | CASLIEDGST LQLGIGAIPD | | | HCASLIEDGS TLQLGIGAIP |
| | | AVLSQLKDKR HLGIHSEMIS | | | DAVLSQLKDK RHLGIHSEMI |
| | 241 | DGVVDLYEAG VIDCSQKSID | | 241 | SDGVVDLYEA GVIDCSQKSI |
| | | KGKMAITFLM GTKRLYDFAA | | | DKGKMAITFL MGTKRLYDFA |
| | | NNPKVELKPV DYINHPSVVA | | | ANNPKVELKP VDYINHPSVV |
| | 301 | QCSKMVCINS CLQVDFMGQI | | 301 | AQCSKMVCIN SCVQVDFMGQ |
| | | VSDSIGTKQY SGVGGQVDFV | | | IVSDSIGTKQ YSGVGGQVDF |
| | | RGASMSIDGK GKAIIAMPSV | | | VRGASMSIDG KGKAIIAMPS |
| | 361 | AKKKDGSMIS KIVPFIDHGA | | 361 | VAKKKDGSMI SKIVPFIDHG |
| | | AVTTSRNDAD YVVTEYGIA | | | AAVTTSRNDA DYVVTEYGIA |
| | | MKGKSLQDRA RALINIAHPD | | | EMKGKSLQDR ARALINIAHP |
| | 421 | FKDELKAEFE KRFNAAF | | 421 | DFKDELKAEF EKRFNAAF |
| | | (SEQ ID NO: 193) | | | (SEQ ID NO: 204) |
| acetyl-CoA | 1 | MSKISWKDLY KSKVVTADEA | 32L, 34G, 36A, | 1 | MSKISWKDLY KSKVVTADEA |
| hydrolase/transferase | | VRKIKSNDRV VTGHACGEPK | 57Q, 110Y, 231R, | | VRKIKSNDRV VLGGAAGEPK |
| [Clostridium | | EIIDAMVRNK DLYENVEIVH | 314S, 316V, 334Y | | EIIDAMVRNK DLYENVEIVQ |
| beijerinckii | 61 | MVSMGKSEYC KPEMAVNFRH | | 61 | MVSMGKSEYC KPEMAVNFRH |
| NCIMB 8052] | | NSIFAGGTTR EAIFDGRADF | | | NSIFAGGTTR EAIFDGRADF |
| Sequence ID: | | TPCFFSEVPK MFREGTLPVD | | | TPCFFSEVPY MFREGTLPVD |
| ref\|YP_001309226.1\| | 121 | VALVQLSVPD EHGYCSFGVS | | 121 | VALVQLSVPD EHGYCSFGVS |
| Length: 436 | | NDYTKPAAEA AKIVIAELNE | | | NDYTKPAAEA AKIVIAELNE |
| | | KMPRTLGDSF IHVSDIDYIV | | | KMPRTLGDSF IHVSDIDYIV |
| | 181 | ETSNDIIELK PPKIGEVEKA | | 181 | ETSNDIIELK PPKIGEVEKA |
| | | IGENCAKLIE DGSTLQLGIG | | | IGENCAKLIE DGSTLQLGIG |
| | | AIPDAVLLFL KGKKDLGIHS | | | AIPDAVLLFL KGKRDLGIHS |
| | 241 | EMISDGVVEL IEAGVITNKA | | 241 | EMISDGVVEL IEAGVITNKA |
| | | KTLHPGKSVV TFLMGTKRLY | | | KTLHPGKSVV TFLMGTKRLY |
| | | DYVNGNPSVA MYPVDYVNNP | | | DYVNGNPSVA MYPVDYVNNP |
| | 301 | CVIAENYKMV SINSCIQVDL | | 301 | CVIAENYKMV SINSCVQVDL |
| | | MGQVAADTIG LKQFSGVGGQ | | | MGQVAADTIG LKQYSGVGGQ |
| | | VDFVRGAAMA KGGKSIIAMP | | | VDFVRGAAMA KGGKSIIAMP |
| | 361 | STASKGKLSR IVPILDEGAT | | 361 | STASKGKLSR IVPILDEGAT |
| | | VTTSRNDIHY VVTEFGIAEL | | | VTTSRNDIHY VVTEFGIAEL |
| | | KGKTLKERAK ALINVAHPDF | | | KGKTLKERAK ALINVAHPDF |
| | 421 | RDALIKEWEK RFKVKF | | 421 | RDALIKEWEK RFKVKF |
| | | (SEQ ID NO: 194) | | | (SEQ ID NO: 205) |
| 4-hydroxybutyrate | 1 | MDWKKIYEEK RCTAKEAVQS | 29L, 31G, 33A, | 1 | MDWKKIYEEK RCTAKEAVQS |
| CoA-transferase | | IKSNDRVVFA HAVAEPTSLV | 57Q, 107Y, 231R, | | IKSNDRVVLA GAAAEPTSLV |
| [Eubacterium | | DAMVENKEAY ENVTISHMFS | 311S, 313V, 331Y | | DAMVENKEAY ENVTISQMFS |
| saphenum ATCC 49989] | 61 | FGKGEYSLPE NSKHFRYEGW | | 61 | FGKGEYSLPE NSKHFRYEGW |
| Sequence ID: | | FNSPNTRKST ELGHGDYVPA | | | FNSPNTRKST ELGHGDYVPA |
| ref\|ZP_05427217.1\| | | FFHQVPSLIR RGVLPVDVVM | | | FFHQVPYLIR RGVLPVDVVM |
| Length: 438 | 121 | VSLSKPDAHG YCSTGVSSDY | | 121 | VSLSKPDAHG YCSTGVSSDY |
| | | TMQAIKSAKV VLAEINDQVP | | | TMQAIKSAKV VLAEINDQVP |
| | | KTFGESFVHI SEIDKLVEHS | | | KTFGESFVHI SEIDKLVEHS |
| | 181 | HPLFELGLPK IGEVEEAIGK | | 181 | HPLFELGLPK IGEVEEAIGK |
| | | HCASLIEDGA TLQLGIGAIP | | | HCASLIEDGA TLQLGIGAIP |
| | | DAVLAQLKHK KDLGIHSEMI | | | DAVLAQLKHK RDLGIHSEMI |
| | 241 | SDGAVELFEA GVINNSKKSI | | 241 | SDGAVELFEA GVINNSKKSI |
| | | DKGKMVVTFL MGTKRLYDFV | | | DKGKMVVTFL MGTKRLYDFV |
| | | NENPAVELRP VDYVNHPEVI | | | NENPAVELRP VDYVNHPEVI |
| | 301 | AKSSNLVCIN ACLQVDFMGQ | | 301 | AKSSNLVCIN SCLQVDFMGQ |
| | | VVSDTIGTRQ FSGVGGQVDF | | | VVSDTIGTRQ YSGVGGQVDF |
| | | VRGAAMAHDE KAKAIIAMPS | | | VRGAAMAHDE KAKAIIAMPS |
| | 361 | VAVKKDGTKI SKIVPFIDHG | | 361 | VAVKKDGTKI SKIVPFIDHG |
| | | AAVTTSRHDT DYIVTEYGIA | | | AAVTTSRHDT DYIVTEYGIA |
| | | EMVGKTMKDR ARSLINIAHP | | | EMVGKTMKDR ARSLINIAHP |
| | 421 | DFRDELKAEF EKRFNVKF | | 421 | DFRDELKAEF EKRFNVKF |
| | | (SEQ ID NO: 195) | | | (SEQ ID NO: 206) |
| 4-hydroxybutyrate | 1 | MSWQELYQQK RMTAEQAVSH | 29L, 31G, 33A, | 1 | MSWQELYQQK RMTAEQAVSH |
| coenzyme A | | IKSGDRVVVA HATGEPSALI | 57Q, 107Y, 230R, | | IKSGDRVVLA GAAGEPSALI |
| transferase | | DAMVKNADAY RNVEIVHMVA | 310S, 312V, 331Y | | DAMVKNADAY RNVEIVQMVA |
| [Clostridium | 61 | MGKGEYCLPE YTENFRHNSL | | 61 | MGKGEYCLPE YTENFRHNSL |
| sp. MSTE9] | | FLGASTRDAI AKGRGDFTPV | | | FLGASTRDAI AKGRGDFTPV |
| Sequence ID: | | YFSQIPDLLR EELHPNVALL | | | YFSQIPYLLR EELHPNVALL |
| ref\|ZP_14663205.1\| | 121 | HLSPPDEHGY CSYGVSVDYT | | 121 | HLSPPDEHGY CSYGVSVDYT |
| Length: 433 | | KPAAEIADLR IAQINPNMPR | | | KPAAEIADLR IAQINPNMPR |
| | | TLGDSFIHVS ELDCIVEVDD | | | TLGDSFIHVS ELDCIVEVDD |
| | 181 | PIIELGQAKI GETECAIGEH | | 181 | PIIELGQAKI GETECAIGEH |
| | | CASLIQDGDC LQLGIGAIPD | | | CASLIQDGDC LQLGIGAIPD |
| | | AVLLFLKEKK DLGIHSEMFS | | | AVLLFLKEKR DLGIHSEMFS |
| | 241 | DGVVELVEAG VITNRRKTLH | | 241 | DGVVELVEAG VITNRRKTLH |
| | | KGQCVVTFLM GSKRLYDYVN | | | KGQCVVTFLM GSKRLYDYVN |
| | | NNPSVAMYPV DYVNNPAVIA | | | NNPSVAMYPV DYVNNPAVIA |
| | 301 | KNDNLVSINS CIQVDLMGQV | | 301 | KNDNLVSINS CVQVDLMGQV |
| | | VSDSIGPRQF SGVGGQVDFV | | | VSDSIGPRQY SGVGGQVDFV |
| | | RGANLSRGGK SIMAMPSSLV | | | RGANLSRGGK SIMAMPSSLV |
| | 361 | KKDGTRVSKI AVQIDAGAAV | | 361 | KKDGTRVSKI AVQIDAGAAV |
| | | TTSRYDVNYI VTEFGVAKLK | | | TTSRYDVNYI VTEFGVAKLK |
| | | GKTLRDRAKA LIEIAHPDFR | | | GKTLRDRAKA LIEIAHPDFR |
| | 421 | EELMEEFHRR FGV | | 421 | EELMEEFHRR FGV |
| | | (SEQ ID NO: 196) | | | (SEQ ID NO: 207) |
| 4-Hydroxybutyrate | 1 | MDWKKIYEDR TCTADEAVKS | 29L, 31G, 33A, | 1 | MDWKKIYEDR TCTADEAVKS |
| CoA-transferase | | IKSGDRVLFA HCVAEPPVLV | 57Q, 107Y, 231R, | | IKSGDRVLLA GCAAEPPVLV |
| [Clostridium | | EAMVANAAAY KNVTVSHMVT | 311S, 313V, 331Y | | EAMVANAAAY KNVTVSQMVT |
| aminobutyricum] | 61 | LGKGEYSKPE YKENFTFEGW | | 61 | LGKGEYSKPE YKENFTFEGW |
| GenBank: CAB60036.2 | | FTSPSTRGSI AEGHGQFVPV | | | FTSPSTRGSI AEGHGQFVPV |
| | | FFHEVPSLIR KDIFHVDVFM | | | FFHEVPYLIR KDIFHVDVFM |
| | 121 | VMVSPPDHNG FCCVGVSSDY | | 121 | VMVSPPDHNG FCCVGVSSDY |
| | | TMQAIKSAKI VLAEVNDQVP | | | TMQAIKSAKI VLAEVNDQVP |
| | | VVYGDTFVHV SEIDKFVETS | | | VVYGDTFVHV SEIDKFVETS |
| | 181 | HPLPEIGLPK IGEVEAAIGK | | 181 | HPLPEIGLPK IGEVEAAIGK |
| | | HCASLIEDGS TLQLGIGAIP | | | HCASLIEDGS TLQLGIGAIP |
| | | DAVLSQLKDK KHLGIHSEMI | | | DAVLSQLKDK RHLGIHSEMI |
| | 241 | SDGVVDLYEA GVIDCSQKSI | | 241 | SDGVVDLYEA GVIDCSQKSI |
| | | DKGKMAITFL MGTKRLYDFA | | | DKGKMAITFL MGTKRLYDFA |
| | | ANNPKVELKP VDYINHPSVV | | | ANNPKVELKP VDYINHPSVV |
| | 301 | AQCSKMVCIN ACLQVDFMGQ | | 301 | AQCSKMVCIN SCVQVDFMGQ |
| | | IVSDSIGTKQ FSGVGGQVDF | | | IVSDSIGTKQ FSGVGGQVDF |
| | | VRGASMSIDG KGKAIIAMPS | | | VRGASMSIDG KGKAIIAMPS |
| | 361 | VAKKKDGSMI SKIVPFIDHG | | 361 | VAKKKDGSMI SKIVPFIDHG |
| | | AAVTTSRNDA DYVVTEYGIA | | | AAVTTSRNDA DYVVTEYGIA |
| | | EMKGKSLQDR ARALINIAHP | | | EMKGKSLQDR ARALINIAHP |
| | 421 | DFKDELKAEF EKRFNAAF | | 421 | DFKDELKAEF EKRFNAAF |
| | | (SEQ ID NO: 197) | | | (SEQ ID NO: 208) |
| acetyl-CoA | 1 | MDWKKLYKSK LVSAKEAVSN | 29L, 31G, 33A, | 1 | MDWKKLYKSK LVSAKEAVSN |
| hydrolase/transferase | | IKSNSRVVVS IAVAEPTELI | 57Q, 107Y, 231R, | | IKSNSRVVVS IAAAEPTELI |
| [Clostridium | | DALVANKENY ENVEVVHMVD | 311S, 313V, 331Y | | DALVANKENY ENVEVVQMVD |
| carboxidivorans P7] | 61 | MGKSEYAQEG MEKYFKYNSI | | 61 | MGKSEYAQEG MEKYFKYNSI |
| Sequence ID: | | FVGASTKDAV NSGRSDFTPC | | | FVGASTKDAV NSGRSDFTPC |
| ref\|ZP_05395303.1\| | | CFYELPRLFE EGYLPVDVVL | | | CFYELPRLFE EGYLPVDVVL |
| Length: 433 | 121 | IQVSKPDKHG YCSFGVSNDY | | 121 | IQVSKPDKHG YCSFGVSNDY |
| | | TKPAADCAKM VIAEVNENMP | | | TKPAADCAKM VIAEVNENMP |
| | | RVLGDSFIHI SDIDYIVETS | | | RVLGDSFIHI SDIDYIVETS |
| | 181 | HPIMELKQPK IGKIEEAIGE | | 181 | HPIMELKQPK IGKIEEAIGE |
| | | YCASLIEDGS TLQLGIGAIP | | | YCASLIEDGS TLQLGIGAIP |
| | | DAVLLFLKDK KDLGIHSEMI | | | DAVLLFLKDK RDLGIHSEMI |
| | 241 | SDGVVDLVES GVINNKEKTL | | 241 | SDGVVDLVES GVINNKEKTL |
| | | NPGKIVVTFF MGTKKLYDFI | | | NPGKIVVTFF MGTKKLYDFI |
| | | DDNPMVESYP VSYVNDPTVI | | | DDNPMVESYP VSYVNDPTVI |
| | 301 | MKNSKMISIN SCVEVDLMGQ | | 301 | MKNSKMISIN SCVEVDLMGQ |
| | | VCSESIGMNQ ISGIGGQVDF | | | VCSESIGMNQ ISGIGGQVDF |
| | | IRGANMCKDG KAIIAIPSTA | | | IRGANMCKDG KAIIAIPSTA |
| | 361 | AKGKVSRIVP LIEKGTPITT | | 361 | AKGKVSRIVP LIEKGTPITT |
| | | SRTDVDYIIT EYGIARLKSK | | | SRTDVDYIIT EYGIARLKSK |
| | | SLKERARALI NIAHPDFRAW | | | SLKERARALI NIAHPDFRAW |
| | 421 | LIDEYEKRFK TKF | | 421 | LIDEYEKRFK TKF |
| | | (SEQ ID NO: 198) | | | (SEQ ID NO: 209) |

[0831] Exemplary cat2 variants include, but are not limited to, single substitutions, or a combination of one or more of the substitutions, at 29L, 31G, 33A, 57Q, 107Y, 231R, 311S, 313V, 331Y for representative sequence(s) shown in Table 54; 29L, 31G, 33A, 57Q, 107Y, 230R, 310S, 312V, 330Y for representative sequence(s) shown in Table 54; 31L, 33G, 35A, 59Q, 109Y, 234R 314S, 316V, 334Y for representative sequence(s) shown in Table 54; 32L, 34G, 36A, 57Q, 110Y, 231R, 3145, 316V, 334Y for representative sequence(s) shown in Table 54; 29L, 31(33A, 57Q, 107Y, 230R, 3105, 312V, 331Y for representative sequence(s) shown in Table 54. Representative combinations include combinations of the single substitutions exemplified in Table 54 as in the corresponding respective sequences, including but not limited to: 3145, 316V; 29L, 33A, 57Q; 231R, 331Y; 57Q, 231R; 57Q, 311S, 57Q, 331Y; 33A, 57Q; 231R, 311S; 311S, 331Y; 231R, 311S, 331Y; 107Y, 231R, 331Y; 57Q, 231R, 311S; 57Q, 311S, 331Y; 57Q, 231R, 311S, 331Y; 31G, 33A, 331Y; 33A, 231R, 331Y; 57Q, 231R, 331Y; 31G, 33A, 331Y; 33A, 331Y; 33A, 57Q, 107Y; 107Y, 310S, 312V, 331Y; 57Q, 231S, 311S, F331Y; 29L, 31G, 33A, 57Q, 107Y, 231R 311S, 313V, 331Y; 109Y, 234R 314S; 59Q, 109Y, 314S, 316V; 31G, 57Q, and the like. It is readily apparent that these an other combinations can be readily made, used and screened using methods well known in the art and as disclosed herein. Based on methods well known in the art for aligning homologous sequences, as described herein, the corresponding positions for the indicated variant amino acid positions of Table 54 can be readily determined for a homologous cat2 sequence.

[0832] Variants of ADH were generated using site-directed mutagenesis and/or saturation mutagenesis and/or error-prone PCR and/or directed evolution. Variants were screened for production of products and/or byproducts such as BDO or ethanol in high-throughput assays or in in vitro assays. Additional variants were generated by random combinations of mutations. An exemplary screening method for ADH activity includes, for example, the above in vivo methods for measuring BDO and/or ethanol production. For in vitro assays, purified enzymes were assayed using 96 well polystyrene plates with 100 μl assay mixture that contained 50 mM Tris, pH 7.4, 150 mM NaCl, 5 mM DTT, 10 mM histidine, 0.3 mM NADPH at varied concentrations of the substrate 4-hydroxybutyraldehyde. The reaction was initiated with addition of purified enzyme and the reduction of NADPH was monitored at 340 nm. Certain enzyme variants exhibited activity of about 1.5-fold, about 2-fold, about 2.5-fold, about 3-fold, about 3.5-fold, about 5-fold, about 6-fold, and about 9-fold higher than wild type. Variants with combinations of two or more variant amino acid positions exhibited activities greater than wild type. Generating enzyme variants by combining active variant amino acid positions resulted in enzyme variants with improved properties.

[0833] Table 55 provides exemplary ADH sequences based on homology. One skilled in the art will readily understand that such sequences can be analyzed with routine and well known methods for aligning sequences (for example BLAST, blast.ncbi nlm nih.gov; Altschul et al., “J. Mol. Biol. 215:403-410 (1990)). Such alignments can provide information on conserved residues that can be utilized to identify a consensus sequence for preserving enzyme activity as well as positions for generating further enzyme variants.

TABLE 55
Exemplary ADH sequences.

| Description | Accession No. |
|---|---|
| NADPH-dependent butanol dehydrogenase [Clostridium novyi NT] | YP_878939.1 |
| >gb\|ABK62471.1\|NADPH-dependent butanol dehydrogenase [Clostridium novyi | GI: 118444971 |
| NT] | (SEQ ID NO: 339) |
| NADPH-dependent butanol dehydrogenase [Clostridium perfringens NCTC 8239] | ZP_02642725.2 |
| >gb\|EDT78274.1\|NADPH-dependent butanol dehydrogenase [Clostridium | GI: 182420493 |
| perfringens NCTC 8239] | (SEQ ID NO: 340) |
| hypothetical protein DORFOR_01493 [Dorea formicigenerans ATCC 27755] | ZP_02234621.1 |
| >gb\|EDR47002.1\|alcohol dehydrogenase, iron-dependent [Dorea formicigenerans | GI: 166031792 |
| ATCC 27755] | (SEQ ID NO: 341) |
| NADPH-dependent butanol dehydrogenase [Clostridium hathewayi DSM 13479] | ZP_06115415.1 |
| >gb\|EFC98086.1\|NADPH-dependent butanol dehydrogenase [Clostridium | GI: 266622480 |
| hathewayi DSM 13479] | (SEQ ID NO: 342) |
| iron-containing alcohol dehydrogenase [Clostridiales bacterium 1_7_47_FAA] | ZP_04668388.1 |
| >gb\|EEQ59453.1\|iron-containing alcohol dehydrogenase [Clostridiales bacterium | GI: 239625357 |
| 1_7_47FAA] | (SEQ ID NO: 343) |
| NADPH-dependent butanol dehydrogenase [Clostridium celatum DSM 1785] | ZP_19299687.1 |
| >gb\|EKY22101.1\|NADPH-dependent butanol dehydrogenase [Clostridium celatum | GI: 429767490 |
| DSM 1785] | (SEQ ID NO: 344) |
| RecName: Full = NADPH-dependent butanol dehydrogenase; Short = BDH | P13604.1 |
| >pir\|\|JU0053 NADPH-dependent butanol dehydrogenase (EC 1.1.1.—)-Clostridium | GI: 113352 |
| acetobutylicum >gb\|AAA83520.1\|NADPH-dependent butanol dehydrogenase | (SEQ ID NO: 345) |
| [Clostridium saccharobutylicum] | |
| Alcohol dehydrogenase, class IV [Ruminococcus bromii L2-63] >emb\|CBL15420.1\| | YP_007781197.1 |
| Alcohol dehydrogenase, class IV [Ruminococcus bromii L2-63] | GI: 479151021 |
| | (SEQ ID NO: 346) |
| NADH-dependent butanol dehydrogenase [Clostridium botulinum NCTC 2916] | ZP_02614964.1 |
| >gb\|EDT80777.1\|NADH-dependent butanol dehydrogenase [Clostridium botulinum | GI: 168180300 |
| NCTC 2916] | (SEQ ID NO: 347) |
| NADPH-dependent butanol dehydrogenase [Clostridium butyricum5521] | ZP_02950013.1 |
| >ref\|ZP_04529706.1\|NADH-dependent butanol dehydrogenase [Clostridium | GI: 182418740 |
| butyricum E4 str. BoNT E BL5262] >gb\|EDT74990.1\|NADPH-dependent butanol | (SEQ ID NO: 348) |
| dehydrogenase [Clostridium butyricum 5521] >gb\|EEP52366.1\|NADH-dependent | |
| butanol dehydrogenase [Clostridium butyricum E4 str. BoNT E BL5262] | |
| NADH-dependent butanol dehydrogenase [Clostridium sp. JC122] | ZP_10929454.1 |
| | GI: 403387397 |
| | (SEQ ID NO: 349) |
| Alcohol dehydrogenase, class IV [butyrate-producing bacterium SSC/2] | YP_007790855.1 |
| >emb\|CBL39860.1\|Alcohol dehydrogenase, class IV [butyrate-producing bacterium | GI: 479161586 |
| SSC/2] | (SEQ ID NO: 350) |
| NADH-dependent butanol dehydrogenase [Clostridium botulinum A3 str. Loch | YP_001787047.1 |
| Maree] >gb\|ACA54890.1\|NADH-dependent butanol dehydrogenase [Clostridium | GI: 170759490 |
| botulinum A3 str. Loch Maree] | (SEQ ID NO: 351) |
| NADH-dependent butanol dehydrogenase [Clostridium botulinum Bf] | ZP_02619369.1 |
| >ref\|YP_002862536.1\|NADH-dependent butanol dehydrogenase [Clostridium | GI: 168184705 |
| botulinum Ba4 str. 657] >gb\|EDT84181.1\|NADH-dependent butanol dehydrogenase | (SEQ ID NO: 352) |
| [Clostridium botulinum Bf] >gb\|ACQ52130.1\|NADH-dependent butanol | |
| dehydrogenase [Clostridium botulinum Ba4 str. 657] | |
| Adh1 [Clostridium kluyveri DSM 555] >gb\|EDK32597.1\|Adh1 [Clostridium | YP_001393945.1 |
| kluyveri DSM 555] | GI: 153953180 |
| | (SEQ ID NO: 353) |
| hypothetical protein CLOLEP_02428 [Clostridium leptum DSM 753] | ZP_02080962.1 |
| >gb\|EDO60823.1\|NADPH-dependent butanol dehydrogenase [Clostridium leptum | GI: 160933574 |
| DSM 753] | (SEQ ID NO: 354) |
| NADH-dependent butanol dehydrogenase [Clostridium botulinum E1 str. ‘BoNT E | ZP_04822415.1 |
| Beluga’] >gb\|EES49700.1\|NADH-dependent butanol dehydrogenase [Clostridium | GI: 251779495 |
| botulinum E1 str. ‘BoNT E Beluga’] | (SEQ ID NO: 355) |
| NADPH-dependent butanol dehydrogenase [Clostridium perfringens B str. ATCC | ZP_02635244.2 |
| 3626] >gb\|EDT24389.1\|NADPH-dependent butanol dehydrogenase [Clostridium | GI: 170763924 |
| perfringens B str. ATCC 3626] | (SEQ ID NO: 356) |
| NADPH-dependent butanol dehydrogenase [Clostridium perfringens SM101] | YP_698587.1 |
| >gb\|ABG87717.1\|NADPH-dependent butanol dehydrogenase [Clostridium | GI: 110803846 |
| perfringens SM101] | (SEQ ID NO: 357) |
| putative NADPH-dependent butanol dehydrogenase [Clostridium carboxidivorans P7] | ZP_06853946.1 |
| >gb\|EFG89794.1\|putative NADPH-dependent butanol dehydrogenase [Clostridium | GI: 296185536 |
| carboxidivorans P7] | (SEQ ID NO: 358) |
| NADPH-dependent butanol dehydrogenase [Clostridium ljungdahlii DSM 13528] | YP_003780648.1 |
| >gb\|ADK15546.1\|predicted NADPH-dependent butanol dehydrogenase [Clostridium | GI: 300855664 |
| ljungdahlii DSM 13528] | (SEQ ID NO: 359) |
| NADPH-dependent butanol dehydrogenase [Clostridium citroniae WAL-17108] | ZP_09058579.1 |
| >gb\|EHE99483.1\|NADPH-dependent butanol dehydrogenase [Clostridium citroniae | GI: 355672858 |
| WAL-17108] | (SEQ ID NO: 360) |
| NADPH-dependent butanol dehydrogenase [Lachnospiraceae bacterium | ZP_08331580.1 |
| 6_1_63FAA] >gb\|EGG80541.1\|NADPH-dependent butanol dehydrogenase | GI: 331082454 |
| [Lachnospiraceae bacterium 6_1_63FAA] | (SEQ ID NO: 361) |
| hypothetical protein CLOSPO_03272 [Clostridium sporogenes ATCC 15579] | ZP_02996149.1 |
| >gb\|EDU37103.1\|alcohol dehydrogenase, iron-dependent [Clostridium sporogenes | GI: 187779676 |
| ATCC 15579] | (SEQ ID NO: 362) |
| NADPH-dependent butanol dehydrogenase [Clostridium perfringens E str. JGS1987] | ZP_02631505.2 |
| >gb\|EDT15707.1\|NADPH-dependent butanol dehydrogenase [Clostridium | GI: 170764079 |
| perfringens E str. JGS1987] | (SEQ ID NO: 363) |
| iron-containing alcohol dehydrogenase [Clostridium saccharoperbutylacetonicum N1- | YP_007455800.1 |
| 4(HMT)] >gb\|AGF56546.1\|iron-containing alcohol dehydrogenase [Clostridium | GI: 451819599 |
| saccharoperbutylacetonicum N1-4(HMT)] | (SEQ ID NO: 364) |
| hypothetical protein HMPREF9476_00911 [Clostridium perfringens WAL-14572] | ZP_16426838.1 |
| >gb\|EHP49458.1\|hypothetical protein HMPREF9476_00911 [Clostridium | GI: 422345924 |
| perfringens WAL-14572] | (SEQ ID NO: 365) |
| hypothetical protein RUMGNA_00563 [Ruminococcus gnavus ATCC 29149] | ZP_02039809.1 |
| >ref\|ZP_08610975.1\|NADPH-dependent butanol dehydrogenase [Lachnospiraceae | GI: 154502749 |
| bacterium 2_1_58FAA] >gb\|EDN79052.1\|NADPH-dependent butanol | (SEQ ID NO: 366) |
| dehydrogenase [Ruminococcus gnavus ATCC 29149] >gb\|EGN49760.1\|NADPH- | |
| dependent butanol dehydrogenase [Lachnospiraceae bacterium 2_1_58FAA] | |
| NADPH-dependent butanol dehydrogenase [Lachnospiraceae bacterium | ZP_08150110.1 |
| 4_1_37FAA] >gb\|EGC75414.1\|NADPH-dependent butanol dehydrogenase | GI: 325661485 |
| [Lachnospiraceae bacterium 4_1_37FAA] | (SEQ ID NO: 367) |
| iron-containing alcohol dehydrogenase [Lachnospiraceae bacterium 5_1_63FAA] | ZP_07957621.1 |
| >gb\|EFV15579.1\|iron-containing alcohol dehydrogenase [Lachnospiraceae bacterium | GI: 317499352 |
| 5_1_63FAA] | (SEQ ID NO: 368) |
| iron-containing alcohol dehydrogenase [Clostridium carboxidivorans P7] | ZP_05393683.1 |
| >ref\|ZP_06856327.1\|NADPH-dependent butanol dehydrogenase [Clostridium | GI: 255526783 |
| carboxidivorans P7] >gb\|EET85851.1\|iron-containing alcohol dehydrogenase | (SEQ ID NO: 369) |
| [Clostridium carboxidivorans P7] >gb\|EFG86503.1\|NADPH-dependent butanol | |
| dehydrogenase [Clostridium carboxidivorans P7] | |
| NADPH-dependent butanol dehydrogenase [Clostridium butyricum 5521] | ZP_02950012.1 |
| >ref\|ZP_04529712.1\|NADH-dependent butanol dehydrogenase [Clostridium | GI: 182418739 |
| butyricum E4 str. BoNT E BL5262] >gb\|EDT74989.1\|NADPH-dependent butanol | (SEQ ID NO: 370) |
| dehydrogenase [Clostridium butyricum 5521] >gb\|EEP52372.1\|NADH-dependent | |
| butanol dehydrogenase [Clostridium butyricum E4 str. BoNT E BL5262] | |
| NADPH-dependent butanol dehydrogenase [Clostridium perfringens ATCC 13124] | YP_695908.1 |
| >gb\|ABG82357.1\|NADPH-dependent butanol dehydrogenase [Clostridium | GI: 110798723 |
| perfringens ATCC 13124] | (SEQ ID NO: 371) |
| NADH-dependent butanol dehydrogenase [Clostridium botulinum A str. ATCC | YP_001254145.1 |
| 3502] >ref\|YP_001383982.1\|NADH-dependent butanol dehydrogenase [Clostridium | GI: 148379604 |
| botulinum A str. ATCC 19397] >ref\|YP_001387526.1\|NADH-dependent butanol | (SEQ ID NO: 372) |
| dehydrogenase [Clostridium botulinum A str. Hall] >ref\|YP_002804061.1\|NADH- | |
| dependent butanol dehydrogenase [Clostridium botulinum A2 str. Kyoto] | |
| >emb\|CAL83178.1\|alcohol dehydrogenase [Clostridium botulinum A str. ATCC | |
| 3502] >gb\|ABS32713.1\|NADH-dependent butanol dehydrogenase [Clostridium | |
| botulinum A str. ATCC 19397] >gb\|ABS38777.1\|NADH-dependent butanol | |
| dehydrogenase [Clostridium botulinum A str. Hall] >gb\|ACO85199.1\|NADH- | |
| dependent butanol dehydrogenase [Clostridium botulinum A2 str. Kyoto] | |
| alcohol dehydrogenase [Clostridium botulinum H04402 065] >emb\|CBZ03525.1\| | YP_005678263.1 |
| alcohol dehydrogenase [Clostridium botulinum H04402 065] | GI: 387817918 |
| | (SEQ ID NO: 373) |
| NADPH-dependent butanol dehydrogenase [Lachnospiraceae bacterium | ZP_08339921.1 |
| 2_1_46FAA] >gb\|EGG84837.1\|NADPH-dependent butanol dehydrogenase | GI: 331091079 |
| [Lachnospiraceae bacterium 2_1_46FAA] | (SEQ ID NO: 374) |
| NADPH-dependent butanol dehydrogenase [Flavonifractor plautii ATCC 29863] | ZP_09382538.1 |
| >gb\|EHM54804.1\|NADPH-dependent butanol dehydrogenase [Flavonifractor plautii | GI: 365841465 |
| ATCC 29863] | (SEQ ID NO: 375) |
| hypothetical protein CLOBOL_01144 [Clostridium bolteaeATCC BAA-613] | ZP_02083621.1 |
| >gb\|EDP18782.1\|hypothetical protein CLOBOL_01144 [Clostridium bolteae ATCC | GI: 160936248 |
| BAA-613] >gb\|ENZ38968.1\|iron-containing alcohol dehydrogenase [Clostridium | (SEQ ID NO: 376) |
| bolteae 90B8] >gb\|ENZ56854.1\|iron-containing alcohol dehydrogenase [Clostridium | |
| bolteae 90A5] >gb\|ENZ68588.1\|iron-containing alcohol dehydrogenase [Clostridium | |
| bolteae 90B7] | |
| hypothetical protein CKR_0480 [Clostridium kluyveri NBRC 12016] | YP_002470945.1 |
| >dbj\|BAH05531.1\|hypothetical protein [Clostridium kluyveri NBRC 12016] | GI: 219853823 |
| | (SEQ ID NO: 377) |
| NADPH-dependent butanol dehydrogenase [Clostridium perfringens C str. JGS1495] | ZP_02864967.1 |
| >gb\|EDS79979.1\|NADPH-dependent butanol dehydrogenase [Clostridium | GI: 169343976 |
| perfringens C str. JGS1495] | (SEQ ID NO: 378) |
| butanol dehydrogenase [Clostridium sp. G117] | AGE10401.1 |
| | GI: 444439764 |
| | (SEQ ID NO: 379) |
| NADPH-dependent butanol dehydrogenase [Clostridium colicanis 209318] | ENZ02568.1 |
| | GI: 480658532 |
| | (SEQ ID NO: 380) |
| NADH-dependent butanol dehydrogenase [Clostridium botulinum F str. Langeland] | YP_001390980.1 |
| >ref\|YP_005674617.1\|NADH-dependent butanol dehydrogenase [Clostridium | GI: 153939046 |
| botulinum F str. 230613] >gb\|ABS40440.1\|NADH-dependent butanol | (SEQ ID NO: 381) |
| dehydrogenase [Clostridium botulinum F str. Langeland] >gb\|ADF99416.1\|NADH- | |
| dependent butanol dehydrogenase [Clostridium botulinum F str. 230613] | |
| iron-containing alcohol dehydrogenase [Clostridium ljungdahlii DSM 13528] | YP_003780011.1 |
| >gb\|ADK14909.1\|predicted iron-containing alcohol dehydrogenase [Clostridium | GI: 300855027 |
| ljungdahlii DSM 13528] | (SEQ ID NO: 382) |
| iron-containing alcohol dehydrogenase [Clostridium cellulovorans 743B] | YP_003845251.1 |
| >ref\|ZP_07629738.1\|iron-containing alcohol dehydrogenase [Clostridium | GI: 302876618 |
| cellulovorans 743B] >gb\|ADL53487.1\|iron-containing alcohol dehydrogenase | (SEQ ID NO: 383) |
| [Clostridium cellulovorans 743B] | |
| NADPH-dependent butanol dehydrogenase [Lachnospiraceae bacterium | ZP_07958427.1 |
| 8_1_57FAA] >ref\|ZP_08336507.1\|NADPH-dependent butanol dehydrogenase | GI: 317500195 |
| [Lachnospiraceae bacterium 3_1_46FAA] >ref\|ZP_08617642.1\|NADPH-dependent | (SEQ ID NO: 384) |
| butanol dehydrogenase [Lachnospiraceae bacterium 1_1_57FAA] >gb\|EFV20449.1\| | |
| NADPH-dependent butanol dehydrogenase [Lachnospiraceae bacterium | |
| 8_1_57FAA] >gb\|EGG80081.1\|NADPH-dependent butanol dehydrogenase | |
| [Lachnospiraceae bacterium 3_1_46FAA] >gb\|EGN48122.1\|NADPH-dependent | |
| butanol dehydrogenase [Lachnospiraceae bacterium 1_1_57FAA] | |
| hypothetical protein C824_02214 [Clostridium sp. ASF502] | EMZ26775.1 |
| | GI: 476619921 |
| | (SEQ ID NO: 385) |
| NADH-dependent butanol dehydrogenase [Clostridium butyricum DKU-01] | EMU52057.1 |
| | GI: 475994253 |
| | (SEQ ID NO: 386) |
| NADPH-dependent butanol dehydrogenase [Clostridium botulinum B str. Eklund | YP_001887401.1 |
| 17B] >gb\|ACD23887.1\|NADH-dependent butanol dehydrogenase [Clostridium | GI: 187934513 |
| botulinum B str. Eklund 17B] | (SEQ ID NO: 387) |
| NADH-dependent butanol dehydrogenase, partial [Clostridium botulinum | ZP_16269747.1 |
| CFSAN001627] >gb\|EKN42565.1\|NADH-dependent butanol dehydrogenase, partial | GI: 421834809 |
| [Clostridium botulinum CFSAN001627] | (SEQ ID NO: 388) |
| Alcohol dehydrogenase, class IV [Ruminococcus torques L2-14] >emb\|CBL26689.1\| | YP_007787197.1 |
| Alcohol dehydrogenase, class IV [Ruminococcus torques L2-14] | GI: 479157602 |
| | (SEQ ID NO: 389) |
| iron-containing alcohol dehydrogenase [Clostridium carboxidivorans P7] | ZP_05391085.1 |
| >gb\|EET88390.1\|iron-containing alcohol dehydrogenase [Clostridium | GI: 255524125 |
| carboxidivorans P7] >gb\|ADO12118.1\|NADH-dependent butanol dehydrogenase | (SEQ ID NO: 390) |
| [Clostridium carboxidivorans P7] | |
| alcohol dehydrogenase [Clostridium beijerinckii] | AAM18709.1 |
| | GI: 20279078 |
| | (SEQ ID NO: 391) |
| iron-containing alcohol dehydrogenase [Clostridium carboxidivorans P7] | ZP_05392917.1 |
| >gb\|EET86647.1\|iron-containing alcohol dehydrogenase [Clostridium | GI: 255525992 |
| carboxidivorans P7] | (SEQ ID NO: 392) |
| Alcohol dehydrogenase [Clostridium sp. DL-VIII] >gb\|EHI97343.1\|Alcohol | ZP_09202750.1 |
| dehydrogenase [Clostridium sp. DL-VIII] | GI: 359410285 |
| | (SEQ ID NO: 393) |
| hypothetical protein RUMTOR_02695 [Ruminococcus torques ATCC 27756] | ZP_01969110.1 |
| >gb\|EDK23148.1\|NADPH-dependent butanol dehydrogenase [Ruminococcus | GI: 153816442 |
| torques ATCC 27756] | (SEQ ID NO: 394 |
| iron-containing alcohol dehydrogenase [Clostridium saccharolyticum WM1] | YP_003821060.1 |
| >gb\|ADL03437.1\|iron-containing alcohol dehydrogenase [Clostridium | GI: 302385238 |
| saccharolyticum WM1] | (SEQ ID NO: 395) |
| NADPH-dependent butanol dehydrogenase [Clostridium ljungdahlii DSM 13528] | YP_003782121.1 |
| >gb\|ADK17019.1\|predicted NADPH-dependent butanol dehydrogenase [Clostridium | GI: 300857137 |
| ljungdahlii DSM 13528] | (SEQ ID NO: 396) |
| NADPH-dependent butanol dehydrogenase [Clostridium butyricum 60E.3] | ENZ30148.1 |
| | GI: 480687146 |
| | (SEQ ID NO: 397) |
| NADPH-dependent butanol dehydrogenase [Clostridium perfringens D str. JGS1721] | ZP_02952006.1. |
| >gb\|EDT73002.1\|NADPH-dependent butanol dehydrogenase [Clostridium | GI: 182624220 |
| perfringens D str. JGS1721] | (SEQ ID NO: 398) |
| NADPH-dependent butanol dehydrogenase [Clostridium perfringens CPE str. F4969] | ZP_02638669.1 |
| >gb\|EDT27639.1\|NADPH-dependent butanol dehydrogenase [Clostridium | GI: 168213044 |
| perfringens CPE str. F4969] | (SEQ ID NO: 399) |
| iron-containing alcohol dehydrogenase [Clostridium beijerinckii NCIMB 8052] | YP_001309304.1 |
| >gb\|AAT38119.1\|alcohol dehydrogenase [Clostridium beijerinckii NCIMB 8052] | GI: 150017050 |
| >gb\|ABR34348.1\|iron-containing alcohol dehydrogenase [Clostridium beijerinckii | (SEQ ID NO: 400) |
| NCIMB 8052] | |
| NADPH-dependent butanol dehydrogenase Adh [Clostridium | YP_007453510.1 |
| saccharoperbutylacetonicum N1-4(HMT)] >gb\|AGF54256.1\|NADPH-dependent | GI: 451817309 |
| butanol dehydrogenase Adh [Clostridium saccharoperbutylacetonicum N1-4(HMT)] | (SEQ ID NO: 401) |
| hypothetical protein BACCAP_02245 [Bacteroides capillosus ATCC 29799] | ZP_02036635.1 |
| >gb\|EDM99972.1\|NADPH-dependent butanol dehydrogenase [Pseudoflavonifractor | GI: 154498257 |
| capillosus ATCC 29799] | (SEQ ID NO: 402) |
| hypothetical protein RUMLAC_02095 [Ruminococcus lactaris ATCC 29176] | ZP_03168412.1 |
| >gb\|EDY31932.1\|NADPH-dependent butanol dehydrogenase [Ruminococcus | GI: 197303373 |
| lactaris ATCC 29176] | (SEQ ID NO: 403) |
| NADPH-dependent butanol dehydrogenase [Clostridium clostridioforme | ZP_09116768.1 |
| 2_1_49FAA] >gb\|EHG29197.1\|NADPH-dependent butanol dehydrogenase | GI: 357055705 |
| [Clostridium clostridioforme2_1_49FAA] >gb\|ENY86875.1\|iron-containing alcohol | (SEQ ID NO: 404) |
| dehydrogenase [Clostridium clostridioforme CM201] >gb\|ENZ01519.1\|iron- | |
| containing alcohol dehydrogenase [Clostridium clostridioforme 90B1] | |
| >gb\|ENZ13590.1\|iron-containing alcohol dehydrogenase [Clostridium | |
| clostridioforme 90A8] >gb\|ENZ21103.1\|iron-containing alcohol dehydrogenase | |
| [Clostridium clostridioforme 90A3] >gb\|ENZ23413.1\|iron-containing alcohol | |
| dehydrogenase [Clostridium clostridioforme 90A1] >gb\|ENZ59818.1\|iron-containing | |
| alcohol dehydrogenase [Clostridium clostridioforme 90A6] >gb\|ENZ65377.1\|iron- | |
| containing alcohol dehydrogenase [Clostridium clostridioforme 90A4] | |
| hypothetical protein CLONEX_01601 [Clostridium nexile DSM 1787] | ZP_03289399.1 |
| >gb\|EEA82540.1\|hypothetical protein CLONEX_01601 [Clostridium nexile DSM | GI: 210612608 |
| 1787] | (SEQ ID NO: 405) |
| NADPH-dependent butanol dehydrogenase [Clostridium tetani E88] | NP_782951.1 |
| >gb\|AA036888.1\|NADPH-dependent butanol dehydrogenase [Clostridium tetani | GI: 28212007 |
| E88] | (SEQ ID NO: 406) |
| NADH-dependent butanol dehydrogenase [Clostridium sporogenes PA 3679] | ZP_18252471.1 |
| >gb\|EHN16013.1\|NADH-dependent butanol dehydrogenase [Clostridium | GI: 424827700 |
| sporogenes PA 3679] | (SEQ ID NO: 407) |
| iron-containing alcohol dehydrogenase [Clostridium beijerinckii NCIMB 8052] | YP_001308850.1 |
| >gb\|ABR33894.1\|iron-containing alcohol dehydrogenase [Clostridium beijerinckii | GI: 150016596 |
| NCIMB 8052] | (SEQ ID NO: 408) |
| NADPH-dependent butanol dehydrogenase [Clostridium botulinum E3 str. Alaska | YP_001922335.1 |
| E43] >gb\|ACD51034.1\|NADH-dependent butanol dehydrogenase [Clostridium | GI: 150016596 |
| botulinum E3 str. Alaska E43] | (SEQ ID NO: 409) |
| NADH-dependent butanol dehydrogenase [Clostridium botulinum B1 str. Okra] | YP_001781276.1 |
| >ref\|ZP_19210096.1\|NADH-dependent butanol dehydrogenase [Clostridium | GI: 170757418 |
| botulinum CFSAN001628] >gb\|ACA46466.1\|NADH-dependent butanol | (SEQ ID NO: 410) |
| dehydrogenase [Clostridium botulinum B1 str. Okra] >gb\|EKX78737.1\|NADH- | |
| dependent butanol dehydrogenase [Clostridium botulinum CFSAN001628] | |
| Alcohol dehydrogenase, class IV [butyrate-producing bacterium SS3/4] | YP_007825178.1 |
| >emb\|CBL42701.1\|Alcohol dehydrogenase, class IV [butyrate-producing bacterium | GI: 479195640 |
| SS3/4] | (SEQ ID NO: 411) |
| hypothetical protein ANACAC_01842 [Anaerostipes caccae DSM 14662] | ZP_02419256.1 |
| >gb\|EDR98218.1\|NADPH-dependent butanol dehydrogenase [Anaerostipes caccae | GI: 167747129 |
| DSM 14662] | (SEQ ID NO: 412) |
| NADPH-dependent butanol dehydrogenase [Clostridium sp. M62/1] | ZP_06346636.2 |
| >gb\|EFE12215.1\|NADPH-dependent butanol dehydrogenase [Clostridium sp. | GI: 291087504 |
| M62/1] | (SEQ ID NO: 413) |
| Alcohol dehydrogenase, class IV [Clostridium cf. saccharolyticum K10] | YP_007848113.1 |
| >emb\|CBK76115.1\|Alcohol dehydrogenase, class IV [Clostridium cf. | GI: 479336895 |
| saccharolyticum K10] | (SEQ ID NO: 414) |
| hypothetical protein CLOSTASPAR_04682 [Clostridium asparagiforme DSM | ZP_03760651.1 |
| 15981] >gb\|EEG53230.1\|hypothetical protein CLOSTASPAR_04682 [Clostridium | GI: 225405462 |
| asparagiforme DSM 15981] | (SEQ ID NO: 415) |
| alcohol dehydrogenase [Clostridium beijerinckii] | AAM18705.1 |
| | GI: 20279073 |
| | (SEQ ID NO: 416) |
| NADPH-dependent butanol dehydrogenase [Clostridium sp. D5] >gb\|EGB92190.1\| | ZP_08130603.1 |
| NADPH-dependent butanol dehydrogenase [Clostridium sp. D5] | GI: 325263870 |
| | (SEQ ID NO: 417) |
| iron-containing alcohol dehydrogenase [Butyrivibrio proteoclasticusB316] | YP_003830744.1 |
| >gb\|ADL34162.1\|iron-containing alcohol dehydrogenase [Butyrivibrio | GI: 302670784 |
| proteoclasticus B316] | (SEQ ID NO: 418) |
| iron-containing alcohol dehydrogenase [Clostridium hathewayi 12489931] | ENY95324.1 |
| | GI: 480651035 |
| | (SEQ ID NO: 419) |
| NADPH-dependent butanol dehydrogenase [Dorea formicigenerans 4_6_53AFAA] | ZP_08848505.1 |
| >gb\|EGX69980.1\|NADPH-dependent butanol dehydrogenase [Dorea | GI: 346306347 |
| formicigenerans 4_6_53AFAA] | (SEQ ID NO: 420) |
| NADPH-dependent butanol dehydrogenase [Clostridium sp. 7_2_43FAA] | ZP_10977308.1 |
| >gb\|EEH97058.1\|NADPH-dependent butanol dehydrogenase [Clostridium sp. | GI: 404372007 |
| 7_2_43FAA] | (SEQ ID NO: 421) |
| hypothetical protein HMPREF1006_02359 [Synergistes sp. 3_1_syn1] | ZP_09360726.1 |
| >gb\|EHL70408.1\|hypothetical protein HMPREF1006_02359 [Synergistes sp. | GI: 365167520 |
| 3_1_syn1] | (SEQ ID NO: 422) |
| NADH-dependent butanol dehydrogenase [Clostridium butyricum DKU-01] | EMU52053.1 |
| 100% | GI: 475994249 |
| | (SEQ ID NO: 423) |
| NADPH-dependent butanol dehydrogenase [Lachnospiraceae bacterium | ZP_08334039.1 |
| 9_1_43BFAA] >gb\|EGG88117.1\|NADPH-dependent butanol dehydrogenase | GI: 331084952 |
| [Lachnospiraceae bacterium 9_1_43BFAA] | (SEQ ID NO: 424) |
| NADPH-dependent butanol dehydrogenase [Clostridium butyricum 60E.3] | ENZ30152.1 |
| | GI: 480687150 |
| | (SEQ ID NO: 425) |
| NADPH-dependet butanol dehydrogenase [Clostridium saccharobutylicum] | CAQ53139.1 |
| | GI: 188027005 |
| | (SEQ ID NO: 426) |
| NADPH-dependent butanol dehydrogenase [Clostridium perfringens str. 13] | NP_562172.1 |
| >dbj\|BAB80962.1\|NADPH-dependent butanol dehydrogenase [Clostridium | GI: 18310238 |
| perfringens str. 13] | (SEQ ID NO: 427) |
| NADPH-dependent butanol dehydrogenase [Clostridium botulinum D str. 1873] | ZP_04861753.1 |
| >gb\|EES92245.1\|NADPH-dependent butanol dehydrogenase [Clostridium botulinum | GI: 253680950 |
| D str. 1873] | (SEQ ID NO: 428) |
| alcohol dehydrogenase [Clostridium lentocellum DSM 5427] >gb\|ADZ84386.1\| | YP_004309584.1 |
| Alcohol dehydrogenase [Clostridium lentocellum DSM 5427] | GI: 326791763 |
| | (SEQ ID NO: 429) |
| NADPH-dependent butanol dehydrogenase [Clostridium botulinum C str. Eklund] | ZP_02620674.1 |
| >gb\|EDS78083.1\|NADPH-dependent butanol dehydrogenase [Clostridium | GI: 168186039 |
| botulinum C str. Eklund] | (SEQ ID NO: 430) |
| NADPH-dependent butanol dehydrogenase [Clostridium perfringens F262] | ZP_16920614.1 |
| >gb\|EIA17164.1\|NADPH-dependent butanol dehydrogenase [Clostridium | GI: 422874129 |
| perfringens F262] | (SEQ ID NO: 431) |
| hypothetical protein CLOSS21_02605 [Clostridium sp. SS2/1] >gb\|EDS20969.1\| | ZP_02440114.1 |
| NADPH-dependent butanol dehydrogenase [Clostridium sp. SS2/1] | GI: 167768061 |
| | (SEQ ID NO: 432) |
| alcohol dehydrogenase, class IV [Clostridium sp. Maddingley MBC34-26] | ZP_11366418.1 |
| >gb\|EKQ51809.1\|alcohol dehydrogenase, class IV [Clostridium sp. Maddingley | GI: 410728237 |
| MBC34-26] | (SEQ ID NO: 433) |
| NADPH-dependent butanol dehydrogenase [Lachnospiraceae bacterium | ZP_08614635.1 |
| 1_4_56FAA] >gb\|EGN32435.1\|NADPH-dependent butanol dehydrogenase | GI: 336434916 |
| [Lachnospiraceae bacterium 1_4_56FAA] | (SEQ ID NO: 434) |
| iron-containing alcohol dehydrogenase [Clostridium botulinum BKT015925] | YP_004396877.1 |
| >gb\|AEB76880.1\|iron-containing alcohol dehydrogenase [Clostridium botulinum | GI: 331270385 |
| BKT015925] | (SEQ ID NO: 435) |
| iron-containing alcohol dehydrogenase [Clostridium clostridioforme 90A7] | ENZ14597.1 |
| >gb\|ENZ44225.1\|iron-containing alcohol dehydrogenase [Clostridium bolteae 90B3] | GI: 480671083 |
| >gb\|ENZ49956.1\|iron-containing alcohol dehydrogenase [Clostridium bolteae 90A9] | (SEQ ID NO: 436) |
| hypothetical protein DORLON_00585 [Dorea longicatena DSM 13814] | ZP_01994600.1 |
| >gb\|EDM63908.1\|NADPH-dependent butanol dehydrogenase [Dorea longicatena | GI: 153853191 |
| DSM 13814] | (SEQ ID NO: 437) |
| iron-containing alcohol dehydrogenase [Anaerostipes sp. 3_2_56FAA] | ZP_07932949.1 |
| >gb\|EFV20975.1\|iron-containing alcohol dehydrogenase [Anaerostipes sp. | GI: 317473660 |
| 3_2_56FAA] | (SEQ ID NO: 438) |

[0834] Table 56 provides exemplary ADH enzyme variants. Table 56 shows exemplary enzyme variant positions with the corresponding amino acid for a particular position that were identified as providing a desirable activity, including ADH activity, BDO production, and the like. It is understood that the individual ADH variants such as those described in Table 56 can be used alone, or can be combined with any other variant amino acid position, including 2, 3, 4, 5, 6, 7, 8, 9, 10, greater than 10 and up to all variant amino acid positions as disclosed herein, to generate additional variants having desirable activities.

TABLE 56
Exemplary ADH enzyme variants.

| Wild-Type | | | | | |
|---|---|---|---|---|---|
| Designation and | | | | | |
| Amino Acid | Wild-Type Sequence | | Corresponding | Exemplary Enzyme | |
| Changes | Corresponding Positions | | Positions | Sequence Indicating | |
| bifunctional | 1 | MKVTNQKELK QKLNELREAQ | 34H, 35A, 487K | 1 | MKVTNQKELK QKLNELREAQ |
| acetaldehyde- | | KKFATYTQEQ VDKIFKQCAI | (alternative; | | KKFATYTQEQ VDKIFKQCAI |
| CoA/alcohol | | AAAKERINLA KLAVEETGIG | not shown), | | AAAKERINLA KLAVEETGIG |
| dehydrogenase | 61 | LVEDKIIKNH FAAEYIYNKY | 619G, 648V, 648C | 61 | LVEDKIIKNH FAAEYIYNKY |
| [Clostridium | | KNEKTCGIID HDDSLGITKV | (alternative; | | KNEKTCGIID HDDSLGITKV |
| acetobutylicum | | AEPIGIVAAI VPTTNPTSTA | not shown), | | AEPIGIVAAI VPTTNPTSTA |
| ATCC 824] | 121 | IFKSLISLKT RNAIFFSPHP | 653F, 659G | 121 | IFKSLISLKT RNAIFFSPHP |
| Sequence ID: | | RAKKSTIAAA KLILDAAVKA | (alternative; | | RAKKSTIAAA KLILDAAVKA |
| ref\|NP_149199.1\| | | GAPKNIIGWI DEPSIELSQD | not shown), | | GAPKNIIGWI DEPSIELSQD |
| Length: 858 | 181 | LMSEADIILA TGGPSMVKAA | 659T, 726Q, 726V | 181 | LMSEADIILA TGGPSMVKAA |
| | | YSSGKPAIGV GAGNTPAIID | (alternative; not | | YSSGKPAIGV GAGNTPAIID |
| | | ESADIDMAVS SIILSKTYDN | shown), 726L | | ESADIDMAVS SIILSKTYDN |
| | 241 | GVICASEQSI LVMNSIYEKV | (alternative; | 241 | GVICASEQSI LVMNSIYEKV |
| | | KEEFVKRGSY ILNQNEIAKI | not shown), | | KEEFVKRGSY ILNQNEIAKI |
| | | KETMFKNGAI NADIVGKSAY | 726S (alternative; | | KETMFKNGAI NADIVGKSAY |
| | 301 | IIAKMAGIEV PQTTKILIGE | not shown), | 301 | IIAKMAGIEV PQTTKILIGE |
| | | VQSVEKSELF SHEKLSPVLA | 729P, 277T, | | VQSVEKSELF SHEKLSPVLA |
| | | MYKVKDFDEA LKKAQRLIEL | 837S, 206R, | | MYKVKDFDEA LKKAQRLIEL |
| | 361 | GGSGHTSSLY IDSQNNKDKV | 222H, 127H, | 361 | GGSGHTSSLY IDSQNNKDKV |
| | | KEFGLAMKTS RTFINMPSSQ | 592D, 334L, | | KEFGLAMKTS RTFINMPSSQ |
| | | GASGDLYNFA IAPSFTLGCG | | | GASGDLYNFA IAPSFTLGCG |
| | 421 | TWGGNSVSQN VEPKHLLNIK | | 421 | TWGGNSVSQN VEPKHLLNIK |
| | | SVAERRENML WFKVPQKIYF | | | SVAERRENML WFKVPQKIYF |
| | | KYGCLRFALK ELKDMNKKRA | | | KYGCLRFALK ELKDMNKKRA |
| | 481 | FIVTDKDLFK LGYVNKITKV | | 481 | FIVTDKDLFK LGYVNKITKV |
| | | LDEIDIKYSI FTDIKSDPTI | | | LDEIDIKYSI FTDIKSDPTI |
| | | DSVKKGAKEM LNFEPDTIIS | | | DSVKKGAKEM LNFEPDTIIS |
| | 541 | IGGGSPMDAA KVMHLLYEYP | | 541 | IGGGSPMDAA KVMHLLYEYP |
| | | EAEIENLAIN FMDIRKRICN | | | EAEIENLAIN FMDIRKRICN |
| | | FPKLGTKAIS VAIPTTAGTG | | | FPKLGTKAIS VDIPTTAGTG |
| | 601 | SEATPFAVIT NDETGMKYPL | | 601 | SEATPFAVIT NDETGMKYGL |
| | | TSYELTPNMA IIDTELMLNM | | | TSYELTPNMA IIDTELMLNM |
| | | PRKLTAATGI DALVHAIEAY | | | PRKLTAAVGI DAFVHAIETY |
| | 661 | VSVMATDYTD ELALRAIKMI | | 661 | VSVMATDYTD ELALRAIKMI |
| | | FKYLPRAYKN GTNDIEAREK | | | FKYLPRAYKN GTNDIEAREK |
| | | MAHASNIAGM AFANAFLGVC | | | MAHASNIAGM AFANAFLGVC |
| | 721 | HSMAHKLGAM HHVPHGIACA | | 721 | HSMAHQLGPM HHVPHGIACA |
| | | VLIEEVIKYN ATDCPTKQTA | | | VLIEEVIKYN ATDCPTKQTA |
| | | FPQYKSPNAK RKYAEIAEYL | | | FPQYKSPNAK RKYAEIAEYL |
| | 781 | NLKGTSDTEK VTALIEAISK | | 781 | NLKGTSDTEK VTALIEAISK |
| | | LKIDLSIPQN ISAAGINKKD | | | LKIDLSIPQN ISAAGINKKD |
| | | FYNTLDKMSE LAFDDQCTTA | | | FYNTLDKMSE LAFDDQSTTA |
| | 841 | NPRYPLISEL KDIYIKSF | | 841 | NPRYPLISEL KDIYIKSF |
| | | (SEQ ID NO: 210) | | | (SEQ ID NO: 222) |
| NADPH-dependent | 1 | MKRFTIPRDI YYGKGSLEVI | 34H, 35A, 35K | 1 | MKRFTIPRDI YYGKGSLEVI |
| butanol | | KSIKGNKAVI VIGGGSMKRF | (alternative; | | KSIKGNKAVI VIGHASMKRF |
| dehydrogenase | | GFLDKVENYL KEAGIETKLI | not shown), | | GFLDKVENYL KEAGIETKLI |
| [Clostridium | 61 | EGVEPDPSVE TVMKGAEIMR | 161G, 190V, 190C | 61 | EGVEPDPSVE TVMKGAEIMR |
| tetani E88] | | EFKPDWIISI GGGSPIDAAK | (alternative; | | EFKPDWIISI GGGSPIDAAK |
| Sequence ID: | | AMWLFYEHPD LTFEEAAQKV | not shown), | | AMWLFYEHPD LTFEEAAQKV |
| ref\|NP_782951.1\| | 121 | LCLPELRSKA KFMAIPSTSG | 195F, 201G | 121 | LCLPELRHKA KFMDIPSTSG |
| Length: 389 | | TASEVTAFSV ITDYKKQIKY | (alternative; | | TASEVTAFSV ITDYKKQIKY |
| | | PLADFNLTPD IAIVDPELAE | not shown), | | GLADFNLTPD IAIVDPELAE |
| | 181 | TMPAKLTAHT GMDALTHAIE | 201T, 265Q, 265V | 181 | TMPAKLTAHV GMDALTHAIE |
| | | AYVATENTSF TDPLALQAIL | (alternative; not | | TYVATERTSF TDPLALQAIL |
| | | MVKDYLIKSY EEDKEARERM | shown), 265L | | MVHDYLIKSY EEDKEARERM |
| | 241 | HEAQCLAGMA FSNALLGITH | (alternative; | 241 | HEAQCLAGMA FSNALLGITH |
| | | SMAHKIGAVF DITHGCANAI | not shown), 265S | | SMAHQIGPVF DITHGCATAI |
| | | FLPYVIQFNS KVCEERYANI | (alternative; not | | FLPYVIQFNS KVCEERYANI |
| | 301 | AKYLGLEGES DKDLVNSLIN | shown), 268P, 278T, | 301 | AKYLGLEGES DKDLVNSLIN |
| | | FIRDLNKKLS IDNSLKEYGI | 361S, 207R, | | FIRDLNKKLS IDNSLKEYGI |
| | | DENEFKEKVE YMAHNAVLDA | 223H, 128H, | | DENEFKEKVE YMAHNAVLDA |
| | 361 | CTGANPRKIN EEEMKNMYTY | 134D, 335L, | 361 | CTGANPRKIN EEEMKNMYTY |
| | | AFNGKDIDF | | | AFNGKDIDF |
| | | (SEQ ID NO: 211) | | | (SEQ ID NO: 223) |
| iron-containing | 1 | MSRFTLPRDI YHGKGALEAL | 34H, 35A, 35K | 1 | MSRFTLPRDI YHGKGALEAL |
| alcohol | | KTLEGKRAIV CVGGSSMKKG | (alternative; | | KTLEGKRAIV CVGHASMKKG |
| dehydrogenase | | GFLQKVEDYL KEAGMEVELF | not shown), | | GFLQKVEDYL KEAGMEVELF |
| [Butyrivibrio | 61 | EGIEPDPSVE TVMKGAEAMQ | 160G, 189V, 189C | 61 | EGIEPDPSVE TVMKGAEAMQ |
| proteoclasticus | | KFQPDWIVAI GGGSPIDAAK | (alternative; not | | KFQPDWIVAI GGGSPIDAAK |
| B316] | | AMWIKYEYPE TTFEDMCKVF | shown), 194F, 200G | | AMWIKYEYPE TTFEDMCKVF |
| Sequence ID: | 121 | GLPKLRTKAH FCAIPSTSGT | (alternative; | 121 | GLPKLRHKAH FCDIPSTSGT |
| ref\|YP_003830744.1\| | | ATEVTAFSII TDYQKGIKYP | not shown), | | ATEVTAFSII TDYQKGIKYG |
| Length: 405 | | IADFEITPDV AIVDPELTHT | 200T, 264Q, 264V | | IADFEITPDV AIVDPELTHT |
| | 181 | MPIKLVAHTG MDAMTHAIEA | (alternative; | 181 | MPIKLVAHVG MDAFTHAIET |
| | | YVSTANCDYT DGLAIHAIEM | not shown), 264L | | YVSTARCDYT DGLAIHAIEM |
| | | IQANLVKSYN GDMESRDAMH | (alternative; not | | IHANLVKSYN GDMESRDAMH |
| | 241 | NAQCLAGMAF SNALLGIVHS | shown), 264S | 241 | NAQCLAGMAF SNALLGIVHS |
| | | MAHKTGAVFA DKGAHIIHGA | (alternative; | | MAHQTGPVFA DKGAHIIHGA |
| | | ANAMYLPKVI AFNAKDETAK | not shown), | | ATAMYLPKVI AFNAKDETAK |
| | 301 | KRYGVIADYM HLGGSNDDEK | 267P, 282T, | 301 | KRYGVIADYM HLGGSNDDEK |
| | | VKLLIDYLRK MNDDLNIPHS | 377S, 206R, 222H, | | VKLLIDYLRK MNDDLNIPHS |
| | | INHYGADGLP ADQGFVAEDV | 127H, 133D, 334L, | | LNHYGADGLP ADQGFVAEDV |
| | 361 | FLERLHDIAA NAILDACTGS | | 361 | FLERLHDIAA NAILDACTGS |
| | | NPRQPSQEEM EKLLKCCYYD | | | NPRQPSQEEM EKLLKCCYYD |
| | | TEVDF | | | TEVDF |
| | | (SEQ ID NO: 212) | | | (SEQ ID NO: 224) |
| hypothetical | 1 | mgrftlprdl yfgkgsletl | 34H, 35A, 35K | 1 | MGRFTLPRDL YFGKGSLETL |
| protein | | ktldgkkavl vlgggsmkrf | (alternative; | | KTLDGKKAVL VLGHASMKRF |
| ANACAC_01842 | | gfvdqvvdyl keagietkli | not shown), | | GFVDQVVDYL KEAGIETKLI |
| [Anaerostipes | 61 | egvepdpsve tvfkgaevmr | 160G, 189V, 189C | 61 | EGVEPDPSVE TVFKGAEVMR |
| caccae | | dfepdwiiam gggspidaak | (alternative; not | | DFEPDWIIAM GGGSPIDAAK |
| DSM 14662] | | amwifyehpe ttfddvkdpf | shown), 194F, 200G | | AMWIFYEHPE TTFDDVKDPF |
| Sequence ID: | 121 | tvpplrnkak flaipstsgt | (alternative; | 121 | TVPPLRHKAK FLDIPSTSGT |
| ref\|ZP_02419256.1\| | | atevtafavi tdyssgikyp | not shown), | | ATEVTAFAVI TDYSSGIKYG |
| | | ladfeitpdi aivdpalaet | 200T, 264Q, 264V | | LADFEITPDI AIVDPALAET |
| | 181 | mppkltsytg mdalthaiea | (alternative; | 181 | MPPKLTSYVG MDAFTHAIET |
| | | yvaglhspfs dplameaiem | not shown), | | YVAGLRSPFS DPLAMEAIEM |
| | | vidnIkasye gdmtarenmh | 264L (alternative; | | VHDNLKASYE GDMTARENMH |
| | 241 | yaqclagmsf snallgivhs | not shown), 264S | 241 | YAQCLAGMSF SNALLGIVHS |
| | | lahktgavfd tghithgcan | (alternative; | | LAHQTGPVFD TGHITHGCAT |
| | | aiylpyviqf nakvceerya | not shown), | | AIYLPYVIQF NAKVCEERYA |
| | 301 | aiarriglpg nsdkaltlsl | 267P, 280T, | 301 | AIARRIGLPG NSDKALTLSL |
| | | ieairemnkk Inivsnlkdf | 363S, 206R, 222H, | | IEAIREMNKK LNIVSNLKDF |
| | | gineeefnqk krmiaerava | 127H, A133D, 337L | | GINEEEFNQK KRMIAERAVA |
| | 361 | dactgsnpre tsvddmekvl | | 361 | DASTGSNPRE TSVDDMEKVL |
| | | eciyygkdvt f | | | ECIYYGKDVT F |
| | | (SEQ ID NO: 213) | | | (SEQ ID NO: 225) |
| NADPH-dependent | 1 | MARFTLPRDL YWGKGSLENL | 34H, 35A, 35K | 1 | MARFTLPRDL YWGKGSLENL |
| butanol | | KTLQGKKAVL VLGGGSMKRF | (alternative; | | KTLQGKKAVL VLGHASMKRF |
| dehydrogenase | | GFVDKAVSYL KEAGIETRLF | not shown), | | GFVDKAVSYL KEAGIETRLF |
| [Lachnospiraceae | 61 | ENVEPDPSVE TVMKGAEFMR | 160G, 189V, 189C | 61 | ENVEPDPSVE TVMKGAEFMR |
| bacterium | | EFEPDWIIAM GGGSPIDAAK | (alternative; | | EFEPDWIIAM GGGSPIDAAK |
| 6_1_63FAA] | | AMWVFYEYPE CTFEEILTPF | not shown), | | AMWVFYEYPE CTFEEILTPF |
| NCBI Reference | 121 | SFPELRKKAK FCAIPSTSGT | 194F, 200G | 121 | SFPELRHKAK FCDIPSTSGT |
| Sequence: | | ATEVTAFSVI TDYAKGIKYP | (alternative; | | ATEVTAFSVI TDYAKGIKYG |
| ZP_08331580.1 | | LADFNITPDV AIVDPELAET | not shown), | | LADFNITPDV AIVDPELAET |
| | 181 | MPKHLVAYTG MDALTHAIEA | 200T, 264Q, 264V | 181 | MPKHLVAYVG MDALTHAIET |
| | | YVSTLHGTFT DPLALKAIQI | (alternative; not | | YVSTLRGTFT DPLALKAIQI |
| | | VNDELTKSYD GDMASREEMH | shown), 264L | | VHDELTKSYD GDMASREEMH |
| | 241 | YGQCLAGMAF SNALLGIVHS | (alternative; | 241 | YGQCLAGMAF SNALLGIVHS |
| | | MAHKTGAAFS TGHITHGLAN | not shown), 264S | | MAHQTGPAFS TGHITHGLAN |
| | | AMYLPYVIKY NAKEAEAKKR | (alternative; | | AMYLPYVIKY NAKEAEAKKR |
| | 301 | YETIAAYLGL EASVDALCNR | not shown), | 301 | YETIAAYLGL EASVDALCNR |
| | | IVELNNYMGI PNTLKEFGIK | 267P, 280T, | | IVELNNYMGI PNTLKEFGIK |
| | | EDEFKEKISE IAKNAVGDAC | 360S, 206R, 222H, | | EDEFKEKISE IAKNAVGDAS |
| | 361 | TGSNPRSIDP ETMEKLFTYI | 127H, 133D, 334L | 361 | TGSNPRSIDP ETMEKLFTYI |
| | | YDGKEVDF | | | YDGKEVDF |
| | | (SEQ ID NO: 214) | | | (SEQ ID NO: 226) |
| NADPH-dependent | 1 | MARFTLPRDI YHGNGSLEVL | 34H, 35A, 35K | 1 | MARFTLPRDI YHGNGSLEVL |
| butanol | | KTLKGKKAVV VVGGGSMKRF | (alternative; | | KTLKGKKAVV VVGHASMKRF |
| dehydrogenase | | GFLEKVENYL KEAGLEVRLI | not shown), | | GFLEKVENYL KEAGLEVRLI |
| [Clostridium | 61 | EGVEPDPSVE TVMNGAAVMR | 160G, 189V, 189C | 61 | EGVEPDPSVE TVMNGAAVMR |
| celatum DSM1785] | | EFEPDWIVAM GGGSPIDAAK | (alternative; | | EFEPDWIVAM GGGSPIDAAK |
| Sequence ID: | | AMWIFYEYPD FTFEEAVVPF | not shown), | | AMWIFYEYPD FTFEEAVVPF |
| ref\|ZP_19299687.1\| | 121 | GLPELRQKAK FVAIPSTSGT | 194F, 200G | 121 | GLPELRHKAK FVDIPSTSGT |
| Length: 388 | | ATEVTAFSVI TDYKAKIKYP | (alternative; not | | ATEVTAFSVI TDYKAKIKYG |
| | | LADFNITPDI AIVDPELAQT | shown), 200T, 264Q, | | LADFNITPDI AIVDPELAQT |
| | 181 | MPAKLVAHTG MDALTHAIEA | 264V (alternative; | 181 | MPAKLVAHVG MDAFTHAIET |
| | | YTASLKSNFS DPLALKAIEM | not shown), 264L | | YTASLRSNFS DPLALKAIEM |
| | | INENLVKSFN GDKNARDLMH | (alternative; | | IHENLVKSFN GDKNARDLMH |
| | 241 | EAQCLAGMAF SNALLGIVHS | not shown), | 241 | EAQCLAGMAF SNALLGIVHS |
| | | MAHKTGAVFH IPHGCANAIF | 264S (alternative; | | MAHQTGPVFH IPHGCATAIF |
| | | LPYVIQYNRS ECEERYADIA | not shown), | | LPYVIQYNRS ECEERYADIA |
| | 301 | KVLKLEGNTN AELTDSLITK | 267P, 277T, | 301 | KVLKLEGNTN AELTDSLITK |
| | | INEFNKELNI PATMQEYGVN | 360S, 206R, 222H, | | INEFNKELNI PATLQEYGVN |
| | | EEEFLANLKN VAHNAVLDAC | 127H, 133D, 334L, | | EEEFLANLKN VAHNAVLDAS |
| | 361 | TGSNPRTIDD ETMEKLLSCT | | 361 | TGSNPRTIDD ETMEKLLSCT |
| | | FYGNKVDF | | | FYGNKVDF |
| | | (SEQ ID NO: 215) | | | (SEQ ID NO: 227) |
| iron-containing | 1 | MSRFTLPRDI YFGENTLETL | 34H, 35A, 35K | 1 | MSRFTLPRDI YFGENTLETL |
| alcohol | | KTLKGKKAII VVGGGSMKKF | (alternative; | | KTLKGKKAII VVGHASMKKF |
| dehydrogenase | | GFLQKVEEYL KEAGMEIKLI | not shown), | | GFLQKVEEYL KEAGMEIKLI |
| [Clostridium | 61 | EGVEPDPSVE TVMKGAEIMR | 160G, 189V, 189C | 61 | EGVEPDPSVE TVMKGAEIMR |
| carboxidivorans | | DFEPDWIVSI GGGSPIDAAK | (alternative; | | DFEPDWIVSI GGGSPIDAAK |
| P7] | | AMWIFYEYPE FTFEQAVVPF | not shown), | | AMWIFYEYPE FTFEQAVVPF |
| NCBI Reference | 121 | GIPDLRQKAK FVAIPSTSGT | 194F, 200G | 121 | GIPDLRHKAK FVDIPSTSGT |
| Sequence: | | ATEVTAFSVI TDYKAKIKYP | (alternative; | | ATEVTAFSVI TDYKAKIKYG |
| ZP_05391085.1 | | LADFNLTPDV AIIDPALAQT | not shown), | | LADFNLTPDV AIIDPALAQT |
| | 181 | MPAKLTAHTG MDALTHAIEA | 200T, 264Q, 264V | 181 | MPAKLTAHVG MDAFTHAIET |
| | | YVAGLRSYFS DPLAMQAIVM | (alternative; not | | YVAGLRSYFS DPLAMQAIVM |
| | | TKDNLIKSYE GDKEARDEMH | shown), 264L | | THDNLIKSYE GDKEARDEMH |
| | 241 | IAQCLAGMAF SNALLGITHS | (alternative; | 241 | IAQCLAGMAF SNALLGITHS |
| | | MAHKTGAVFH IPHGCANAIF | not shown), 264S | | MAHQTGPVFH IPHGCATAIF |
| | | LPYVIDFNKK TCKDRYATIA | (alternative; not | | LPYVIDFNKK TCKDRYATIA |
| | 301 | KTLGLAGNTD DELVDALTSM | shown), 267P, 277T, | 301 | KTLGLAGNTD DELVDALTSM |
| | | IQEMNKKMDI PLNLKEYGVT | 360S, 206R, 222H, | | IQEMNKKMDI PLNLKEYGVT |
| | | EEDFNENLDF IAHNAVLDAC | 127H, 133D, 334L, | | EEDFNENLDF IAHNAVLDAS |
| | 361 | TGSNPRPITE EEMKKVFKCT | | 361 | TGSNPRPITE EEMKKVFKCT |
| | | FTGEKVNF | | | FTGEKVNF |
| | | (SEQ ID NO: 216) | | | (SEQ ID NO: 228) |
| NADPH-dependent | 1 | MARFTLPRDI YHGEGSLEVL | 34H, 35A, | 1 | MARFTLPRDI YHGEGSLEVL |
| butanol | | KTLKGKKAFV VVGGGSMKRF | 35K (alternative; | | KTLKGKKAFV VVGHASMKRF |
| dehydrogenase | | GFLQKVENYL KEAGMEVELF | not shown), | | GFLQKVENYL KEAGMEVELF |
| [Clostridium | 61 | EGVEPDPSVE TVMKGAEAMR | 160G, 189V, 189C | 61 | EGVEPDPSVE TVMKGAEAMR |
| butyricum | | KFQPDWIVAM GGGSPIDAAK | (alternative; not | | KFQPDWIVAM GGGSPIDAAK |
| 60E.3]. | | AMWIFYEYPD FTFEQAVVPF | shown), 194F, 200G | | AMWIFYEYPD FTFEQAVVPF |
| ACCESSION | 121 | GLPELRQKAK FVAIPSTSGT | (alternative; | 121 | GLPELRHKAK FVDIPSTSGT |
| ENZ30152 | | ATEVTAFSVI TNYTEKIKYP | not shown), | | ATEVTAFSVI TNYTEKIKYG |
| VERSION | | LADFNITPDI AIVDPELAQT | 200T, 264Q, 264V | | LADFNITPDI AIVDPELAQT |
| ENZ30152.1 | 181 | MPAKLVAHTG MDALTHAIEA | (alternative; | 181 | MPAKLVAHVG MDAFTHAIET |
| GI: 480687150 | | YTASLRSNFS DPLAIKAIEM | not shown), | | YTASLRSNFS DPLAIKAIEM |
| | | VNENLVKSFE GDKTARNLMH | 264L (alternative; | | VHENLVKSFE GDKTARNLMH |
| | 241 | EAQCLAGMAF SNALLGIVHS | not shown), 264S | 241 | EAQCLAGMAF SNALLGIVHS |
| | | MAHKVGAVFH IPHGCANAIF | (alternative; | | MAHQVGPVFH IPHGCATAIF |
| | | LPYVIKYNRK VCEDRYADIA | not shown), | | LPYVIKYNRK VCEDRYADIA |
| | 301 | RALKLEGNTD AELTDSLIKL | 267P, 277T, | 301 | RALKLEGNTD AELTDSLIKL |
| | | INEFNDDLSI PHSMKEYGVE | 360S, 206R, 222H, | | INEFNDDLSI PHSLKEYGVE |
| | | EADFKSNVKF IAHNAILDAC | 127H, 133D, 334L | | EADFKSNVKF IAHNAILDAS |
| | 361 | TGSSPREIDE ETMEKLFECT | | 361 | TGSSPREIDE ETMEKLFECT |
| | | YYGTDVNF | | | YYGTDVNF |
| | | (SEQ ID NO: 217) | | | (SEQ ID NO: 229) |
| iron-containing | 1 | MARFTLPRDL YHGEGALEVL | 34H, 35A, | 1 | MARFTLPRDL YHGEGALEVL |
| alcohol | | KTLKGKKAFV VVGGGSMKRF | 35K (alternative; | | KTLKGKKAFV VVGHASMKRF |
| dehydrogenase | | GFLQKVENYL KEAGMEVELF | not shown), | | GFLQKVENYL KEAGMEVELF |
| [Clostridium | 61 | EGVEPDPSVE TVMKGAEAMR | 160G, 189V, | 61 | EGVEPDPSVE TVMKGAEAMR |
| saccharoper- | | NFEPDWIVSI GGGSPIDAAK | 189C (alternative; | | NFEPDWIVSI GGGSPIDAAK |
| butylacetonicum | | AMWIFYEYPD FTFEQAVVPF | not shown), | | AMWIFYEYPD FTFEQAVVPF |
| N1-4(HMT)] | 121 | GLPELRQKAK FVAIPSTSGT | 194F, 200G | 121 | GLPELRHKAK FVDIPSTSGT |
| NCBI Reference | | ATEVTAFSVI TNYTERIKYP | (alternative; | | ATEVTAFSVI TNYTERIKYG |
| Sequence: | | LADFNITPDI AIIDPELAQT | not shown), | | LADFNITPDI AIIDPELAQT |
| YP_007455800.1 | 181 | MPKTLTAHTG MDALTHAIEA | 200T, 264Q, 264V | 181 | MPKTLTAHVG MDAFTHAIET |
| | | YTASLRSNFS DPLAIKAIEM | (alternative; | | YTASLRSNFS DPLAIKAIEM |
| | | VNENLFKSYE GDKEARNLMH | not shown), 264L | | VHENLFKSYE GDKEARNLMH |
| | 241 | EAQCLAGMAF SNALLGIVHS | (alternative; not | 241 | EAQCLAGMAF SNALLGIVHS |
| | | MAHKVGAVFH IPHGCANAIF | shown), 264S | | MAHQVGPVFH IPHGCATAIF |
| | | LPYVIQYNRT KCEERYADIA | (alternative; | | LPYVIQYNRT KCEERYADIA |
| | 301 | RALKLEGNND AELTDALIAR | not shown), | 301 | RALKLEGNND AELTDALIAR |
| | | INKLNEKLSI PSSMKEYGVT | 267P, 277T, | | INKLNEKLSI PSSLKEYGVT |
| | | EEDFKANLSF IAHNAVLDAC | 360S, 206R, 222H, | | EEDFKANLSF IAHNAVLDAS |
| | 361 | TGSNPREIDD ATMEKLFECT | 127H, 133D, 334L | 361 | TGSNPREIDD ATMEKLFECT |
| | | FYGTKVEL | | | FYGTKVEL |
| | | (SEQ ID NO: 218) | | | (SEQ ID NO: 230) |
| iron-containing | 1 | MARFTLPRDI YHGEGALEAL | 34H, 35A, 35K | 1 | MARFTLPRDI YHGEGALEAL |
| alcohol | | KTLKGKKAFL VVGGGSMKRF | (Alternative; | | KTLKGKKAFL VVGHASMKRF |
| dehydrogenase | | GFLKQVEDYL KEAGMEVELF | not shown), | | GFLKQVEDYL KEAGMEVELF |
| [Clostridium | 61 | EGVEPDPSVE TVMKGAEAMR | 160G, 189V, 189C | 61 | EGVEPDPSVE TVMKGAEAMR |
| beijerinckii | | NFEPDWIVAM GGGSPIDAAK | (Alternative; not | | NFEPDWIVAM GGGSPIDAAK |
| NCIMB 8052] | | AMWIFYEYPD FTFEQAVVPF | shown), 194F, 200G | | AMWIFYEYPD FTFEQAVVPF |
| NCBI Reference | 121 | GLPDLRQKAK FVAIPSTSGT | (Alternative; | 121 | GLPELRHKAK FVDIPSTSGT |
| Sequence: | | ATEVTAFSVI TNYSEKIKYP | not shown), | | ATEVTAFSVI TNYSEKIKYG |
| YP_001309304.1 | | LADFNITPDI AIVDPALAQT | 200T, 264Q, 264V | | LADFNITPDI AIVDPALAQT |
| | 181 | MPKTLTAHTG MDALTHAIEA | (Alternative; not | 181 | MPKTLTAHVG MDAFTHAIET |
| | | YTASLQSNFS DPLAIKAVEM | shown), 264L | | YTASLRSNFS DPLAIKAVEM |
| | | VQENLIKSFE GDKEARNLMH | (Alternative; | | VHENLIKSFE GDKEARNLMH |
| | 241 | EAQCLAGMAF SNALLGIVHS | not shown), 264S | 241 | EAQCLAGMAF SNALLGIVHS |
| | | MAHKVGAVFH IPHGCANAIF | (Alternative; not | | MAHQVGPVFH IPHGCATAIF |
| | | LPYVIEYNRT KCENRYGDIA | shown), 267P, 277T, | | LPYVIEYNRT KCENRYGDIA |
| | 301 | RALKLKGNND AELTDSLIEL | 360S, 206R, 222H, | 301 | RALKLKGNND AELTDSLIEL |
| | | INGLNDKLEI PHSMKEYGVT | 127H, 133D, 334L | | INGLNDKLEI PHSLKEYGVT |
| | | EEDFKANLSF IAHNAVLDAC | | | EEDFKANLSF IAHNAVLDAS |
| | 361 | TGSNPREIDD ATMEKLFECT | | 361 | TGSNPREIDD ATMEKLFECT |
| | | YYGTKVNL | | | YYGTKVNL |
| | | (SEQ ID NO: 219) | | | (SEQ ID NO: 231) |
| hypothetical | 1 | MSRFTLPRDI YYGANALEAL | 34H, 35A, 35K | 1 | MSRFTLPRDI YYGANALEAL |
| protein | | KTLKGKKAVM VLGGGSMKRF | (alternative; | | KTLKGKKAVM VLGHASMKRF |
| BACCAP_02245 | | GFVDKAIGYL KEAGIETKLF | not shown), | | GFVDKAIGYL KEAGIETKLF |
| [Bacteroides | 61 | ENVEPDPSVE TVMKGAAMMR | 160G, 189V, T189C | 61 | ENVEPDPSVE TVMKGAAMMR |
| capillosus | | EFEPDWIISM GGGSPIDAAK | (alternative; | | EFEPDWIISM GGGSPIDAAK |
| ATCC 29799] | | AMWAFYEYPE TTFEDLITPF | not shown), 194F, | | AMWAFYEYPE TTFEDLITPF |
| Sequence ID: | 121 | NFPELRQKAK FCAIPSTSGT | 200G (alternative; | 121 | NFPELRHKAK FCDIPSTSGT |
| ref\|ZP_02036635.1\| | | ATEVTAFSVI TDYAKGIKYP | not shown), | | ATEVTAFSVI TDYAKGIKYG |
| | | LADFNITPDV AIVDPALAET | 200T, 264Q, 264V | | LADFNITPDV AIVDPALAET |
| | 181 | MPPHLVAYTG MDALTHAIEA | (alternative; not | 181 | MPPHLVAYVG MDAFTHAIET |
| | | YVSTLHTVFT DPLAIEAIHI | shown), 264L | | YVSTLRTVFT DPLAIEAIHI |
| | | VEKDLIKSFK GDMTCREEMH | (alternative; | | VHKDLIKSFK GDMTCREEMH |
| | 241 | YGQCLAGMAF SNALLGIVHS | not shown), 264S | 241 | YGQCLAGMAF SNALLGIVHS |
| | | MAHKTGAAFS TGHITHGLAN | (alternative; not | | MAHQTGPAFS TGHITHGLAT |
| | | AMYLPYVIAY NSKADGVAER | shown), 267P, 280T, | | AMYLPYVIAY NSKADGVAER |
| | 301 | YADIARTMGV VGDTTAELVE | 360S, 206R, 222H, | 301 | YADIARTMGV VGDTTAELVE |
| | | GLRAKIRSMN DAMGIPNTLK | 127H, 133D, 339L | | GLRAKIRSMN DAMGIPNTLK |
| | | DFGIIEDEFK EKLEAIATNA | | | DFGIIEDEFK EKLEAIATNA |
| | 361 | VGDACTGSNP RPIDPATMAK | | 361 | VGDASTGSNP RPIDPATMAK |
| | | LFTCIYYGTE VDF | | | LFTCIYYGTE VDF |
| | | (SEQ ID NO: 220) | | | (SEQ ID NO: 232) |
| NADPH-dependent | 1 | MGGIISMARF TLPRDIYHGK | 40H, 41A, 41K | 1 | MGGIISMARF TLPRDIYHGK |
| butanol | | DSLEVLKSLE GKKAFIVIGG | (alternative; | | DSLEVLKSLE GKKAFIVIGH |
| dehydrogenase | | GSMKRFGFLD KVLSYLKEAN | not shown), | | ASMKRFGFLD KVLSYLKEAN |
| [Clostridium | 61 | METKVFEGVE PDPSVETVMK | 166G, 195V, 195C | 61 | METKVFEGVE PDPSVETVMK |
| perfringens | | GAKEMEEFNP DWIVSIGGGS | (alternative; | | GAKEMEEFNP DWIVSIGGGS |
| E str. JGS1987] | | PIDAAKAMWI FYEYPDFTFE | not shown), | | PIDAAKAMWI FYEYPDFTFE |
| Sequence ID: | 121 | KAIVPFGLPK LRRKAKFVAI | 200F, 206G | 121 | KAIVPFGLPK LRHKAKFVDI |
| ref\|ZP_02631505.2\| | | PSTSGTATEV TAFSVITDYK | (alternative; | | PSTSGTATEV TAFSVITDYK |
| Length: 394 | | AKIKYPLADF EITPDIAIVD | not shown), | | AKIKYGLADF EITPDIAIVD |
| | 181 | PSLAETMPEK LVAHTGMDAL | 206T, 270Q, 270V | 181 | PSLAETMPEK LVAHVGMDAF |
| | | THAIEAYTAS LRSNFTDPLA | (alternative; not | | THAIETYTAS LRSNFTDPLA |
| | | LKAIEMVNMH LVNSFKGDME | shown), 270L | | LKAIEMVHMH LVNSFKGDME |
| | 241 | ARGEMHEAQC LAGMAFSNAL | (alternative; | 241 | ARGEMHEAQC LAGMAFSNAL |
| | | LGIVHSMAHK VGAVFHIPHG | not shown), 270S | | LGIVHSMAHQ VGPVFHIPHG |
| | | CANAIFLPYV IKYNRKACED | (alternative; not | | CATAIFLPYV IKYNRKACED |
| | 301 | RYAQIARHIG LKGESERELT | shown), 273P, 283T, | 301 | RYAQIARHIG LKGESERELT |
| | | DALIDLINKF NKELNIPSSM | 366S, 212R, 228H, | | DALIDLINKF NKELNIPSSM |
| | | KEYGIDENEF KTNLKFIAHN | 133H, 139D, 340L | | KEYGIDENEF KTNLKFIAHN |
| | 361 | AVLDPCTGSN PREIDDETME | | 361 | AVLDPSTGSN PREIDDETME |
| | | KLYTCAYYGS DVDF | | | KLYTCAYYGS DVDF |
| | | (SEQ ID NO: 221) | | | (SEQ ID NO: 233) |

[0835] Exemplary ADH variants include, but are not limited to single substitutions, or a combination of one or more of the substitutions, at 34H, 35A, 35K, 161G, 190V, 190C, 190H, 195F, 201G, 201T, 201L, 201F, 265Q, 265V, 265L, 265S, 268P, 278T, 361S, 207R, 223H, 128H, 134D, 335L for representative sequences) shown in Table 56; 34H, 35A, 35K, 160G, 189V, 189C, 189A, 194F, A200G, 200T, 200S, 264Q, 264V, 264L, 264S, 267P, 282T, 377S, 206R, 222H, 127H, 133D, 334L for representative sequence(s) shown in Table 56; 34H, 35A, 35K, 160G, 189V, 189C, 194F, 200G, 200T, 264Q, 264V, 264L, 264S, 264A, 267P, 280T, 363S, 206R, 222H, 127H, 133D, 337L for representative sequences) shown in Table 56; 34H, 35A, 35K, 160G 189V, 189C, 194F, 200G, 200T, 264Q, 264V, 264L, 264S, 267P, 280T, 360S, 206R, 222H, 127H, 133D, 334L for representative sequence(s) shown in Table 56; 34H, 35A, 35K, 160G, 189V, 189C, 194F, 2000, 200T, 264Q, 264V, 264L, 264S, 267P, 277T, 360S, 206R, 222H, 127H, 133D, 334L for representative sequences) shown in Table 56; 34H, 35A, 35K, 160G, 189V, 189C, 194F, 200G, 200T, 264Q, 264V, 264L, 264S, 267P, 277T, 360S, 206R, 222H, 127H, 133D, 334L for representative sequence(s) shown in Table 56; 34H, 35A, 35K, 160(189V, 189C, 194F, 200G, 200T, 264Q, 264V, 264L, 264S, 267P, 277T, 360S, 206R, 222H, 127H, 133D 334L for representative sequence(s) shown in Table 56; 34H, 35A, 35K, 160G, 189V, 189C, 194F, 200G 200T, 264Q, 264V, 264L, 264S, 267P, 277T, 360S, 206R, 222H, 127H, 133D, 334L for representative sequence(s) shown in Table 56; 34H, 35A, 35K, 160G, 189V, 189C, 194F, 200(200T, 264Q, 264V, 264L, 264S, 267P, 277T, 360S, 206R, Q222H, Q127H, A133D, M334L for representative sequence(s) shown in Table 56; 34H, 35A, 35K, 160G, 189V, T189C, 194F, 200G, 200T, 264Q, 264V, 264L, 264S, 267P, 280T, 360S, 206R, 222H, 127H, 133D, 339L for representative sequence(s) shown in Table 56; 40H, 41A, 41K, 166E 195V, 195C, 200F, 206G, 206T, 270Q, 270V, 270L, 270S, 273P, 283T, 366S, 212R, 228H, 133H, 139D, 340L for representative sequence(s) shown in Table 56. Representative combinations include combinations of the single substitutions exemplified in Table 56 as in the corresponding respective sequences, including but not limited to: 34H, 35A; 34H, 160G; 35A, 160G; 35K, 160G; 133D, 206R, 334L; 267P, 206R, 222H, 127H, 133D; Q222H, A133D, M334L; Q222H, Q127H, A133D, M334L; 200T, 267P; 160G, 189V, 200G, 267P; 160G, 189V, 200T, 267P; 160G, 189C, 200G, 267P; 160G, 189C, 200T, 267P; 160G, 200T; 160G, 267P; 360S, 206R, 222H, 127H; 160G, 189V, 200T, 267P, 360S; 160G, 189C, 200T, 267P, 360S; 160G, 200G, 267P, 277T, 360S, 206R, 222H, 127H, 133D, 334L; 160G, 200T, 267P, 277T, 360S, 206R, 222H, 127H, 133D, 334L; 160G, 200G, 267P, 277T, 360S; 160G, 200T, 267P, 277T, 360S; 160G, 200G, 267P; 160G, 200T, 267P; 360S, 222H, 133D; 360S, 127H, 133D; 127H, 133D; 127H, 133D, 200T; 133D, 200T; 200T, 267P; 194F, 200G 264Q, 264V; 206R, 222H; 34H, 222H; 35A, 160G, 200T, 267P; 160G, 200T, 267P; 160G, 200G, 267P, 277T, 360S; 160G, 200G, 267P, C360S; 160G, 200G; 160G, 200T; 160G, 267P; 200G, 267P; 200G, 267P, 277T, 360S, 206R, 222H, 127H, 133D, 334L; 200T, 267P, 277T, 360S, 206R, 222H, 127H, 133D, 334L; 200G, 267P, 360S, 206R, 222H, 127H, 133D, 334L; 200T, 267P, 360S, 206R, 222H, 127H, 133D, 334L; 127H, 200T; 200G, 267P, 206R, 222H, 127H, 133D, 334L; 200T, 267, 206R, 222, 127H, 133D, 334L; 200G, 267P, 222H, 127H, 133D, 334L; 200T, 267P, 222H, 127H, 133D, 334L; 200G, 267P, 127H, 133D, 334L; 200T, 267P, 127H, 133D, 334L; 200G, 267P, 334L; 200T, 267P, 334L; 200G, 334L; 200T, 334L; 267P, 334L; 200T, 267P, 334L; 200G, 133D; 200T, 133D; 34H, 35A, 160G, 194F; 34H, 35K, 160G, 194F; 34H, 160G, 189V, 194F; 34H, 160G, 189C, 194F; 34H, 189V, 194F, 200G, 334L; 34H, 189V, 194F, 200T, 334L; 34H, 189C, 194F, 200G, 334L; 34H, 189C, 194F, 200T, 334L; 34H, 194F, 267P, 360S, 334L; 34H, 194F, 267P, 360S; 34H, 264Q, 277T, 360S; 34H, 264L, 277T, 360S; 34H, 264L, 277T, 360S; 34H, 264S, 277T, 360S; 194F, 200T, 267P, 222H; 34H, 35A, 160G, 189C, 194F, 200T, 264Q, 267P, 277T, 360S; 34H, 35A, 160G, 189V, 194F, 200T, 264V, 267P, 277T, 360S; 34H, 35K, 160G, 189V, 194F, 200T, 264L, 267P, 277T, 360S; G34H, 35K, 160G, 189V, 194F, 200T, 264S, 267P, 277T, 360S; 34H, 35K, 160G, 189V, 194F, 200T, 264Q, 267P, 277T; 34H, 35K, 160G, 189V, 194F, 200T, 264Q, 267P; 35K, 160G, 189V, 194F, 200T, 267P; 160G, 189C, 194F, 200T, 267P; 160G, 189V, 200T, 267P; 34H, G35K, 160G, 189V, 200T, 264Q, 267P, 277T, 360S, 206R; 160G, 189C, 194F, 200T, 264Q, 267P, 360S, 334L; 194F, 264Q; 194F, 264V; 194F, 264L; 194F, 264S; 200E 360S; 200T, 360S; 200G, 206R; 200T, 206R; 200T, 222H; 200G, 127H, 133D, 334L; 200T, 127H, 133D, 334L; 277T, 360S, 206S, 222H, 127H, 133D, 334L; 360S, 206R, 222H, 127H, 133D, 334L; 206S, 222H, 127H, 133D, 334L; 222H, 127H, 133D, 334L; 127H, 133D, 334L; 133D, 334L; 160G, 133D, 334L; 200G 277T, 360S, 206S, 222H, 127H, 133D; 200T, 277T, 360S, 206R, 222H, 127H, 133D; 200G, 277T, 360S, 206R, 222H, 127H; 200T, 277T, 360S, 206S, 222H, 127H; 200G, 277T, 360S, 206S, 222H; 200T, 277T, 360S, 206S, 222H; 200G, 277T, 360S, 206R; 200T, 277T, 360S, 206R; 200G, 277T, 360S; 200T, 277T, 360S; 194F, 360S, 334L; 194F, 360S, 206S, 222H, 127H, 133D, 334L; 194F, 200T, 264Q, 264V; 166G, 195C, 200F; 160G, 200T, 267P; 34H, 35A, 223H, 128H; 267P, 360S, 206R; 277T, 360S, 206R; 34H, 35A, 200G; 40H, 195V, 206T, 270V, and the like. It is readily apparent that these an other combinations can be readily made, used and screened using methods well known in the art and as disclosed herein. Based on methods well known in the art for aligning homologous sequences, as described herein, the corresponding positions for the indicated variant amino acid positions of Table 56 can be readily determined for a homologous ADH sequence.

[0836] Variants of ALD were generated using site-directed mutagenesis and/or saturation mutagenesis and/or error-prone PCR and/or directed evolution. Variants were screened for production of products and/or byproducts such as BDO or ethanol in high-throughput assays or in in vitro assays as well. Additional variants were generated by random combinations of mutations. At least 179 variants were identified having activity for producing BDO and 4HB, and the variants exhibited production of at least about the same or higher concentrations of 4HB than BDO. At least the same or increased activities were observed in both in vitro and in vivo assays for numerous variants. Certain variants exhibited activity of about 2-fold or greater than the wild type parental enzyme, for example, about 2.5-fold, about 3-fold, about 3.5-fold, about 5-fold, and about 6-fold greater than wild type. Variants with combinations of two or more variant amino acid positions exhibited activities greater than wild type. Generating enzyme variants by combining active variant amino acid positions resulted in enzyme variants with improved properties.

[0837] Exemplary screening methods for ALD activity include, for example, the above in vivo methods for measuring BDO and/or ethanol production as well as a 4-hydroxybutyrate (4HB) consumption assay or an in vivo method for measuring BDO, 4-hydroxybutyrate (4HB) and/or gamma-butyrolactone (GBL) production.

[0838] The 4-hydroxybutyrate (4HB) consumption assay was performed by 300 μl of M9-MOPS-antibiotic medium containing IPTG (0.2 mM for induction of protein expression) and 4-hydroxybutyrate (50 mM) in a 96-well plate were aseptically inoculated with 6 μl glycerol stock of the clone harboring the plasmid with the aldehyde dehydrogenase gene. A sealing mat was placed on top and the whole plate wrapped in a gas-tight pouch to create a micro-aerobic environment. Cells were then grown under shaking at 30° C. for 20 hours. After measuring the OD of the grown culture, cells were removed by centrifugation and the supernatant used for quantification of the remaining 4HB. To quantify 4HB, an enzymatic reaction was applied in which 4HB is oxidized with NAD+ to succinate semialdehyde using a succinic semialdehyde dehydrogenase. The concentration of remaining 4HB is determined by extrapolation to a standard curve with defined 4HB concentrations. Aldehyde dehydrogenase (Ald) variants were also evaluated for 4-hydroxybutyryl-CoA reductase activity by an enzyme-coupled assay, where the first enzyme is carboxylic acid transferase 2 (Cat2) and the second enzyme is the test Ald variant. Lysates were typically prepared by chemical lysis containing lysozyme, nuclease, 10 mM DTT, and with or without 1 mM coenzyme A. The standard screening assay solution contained 0.1 M Tris-HCl, pH 6.5, 20 mM 4-hydroxybutyric acid, 2 mM acetyl-CoA, 0.25 mM NADH, and 0.25 mM NADPH. Alternatively, the screening assay was conducted without 4HB. The reaction was initiated by the addition of an enzyme lysate that contained both Cat2 and the Ald variant. Initial rate was determined by measuring the linear decrease in cofactor fluorescence (excitation wavelength=360 nm; emission wavelength=465 nm) using a microtiter plate reader.

[0839] The in vivo assay for measuring production of BDO, 4-hydroxybutyrate (4HB) and/or gamma-butyrolactone (GBL) was performed by aseptically inoculating a 96 deep well plate with 1 ml of LB+ required antibiotic(s) with the colonies of interest. Plates were covered with a gas permeable adhesive seal and incubated overnight (ON) with shaking in a humidified incubator at 37° C. The next day, 100 μl of the ON culture was transferred into a new 96 well plate, containing 1 nil of M9-MOPS-antibiotic medium per well. After a 5-6 hour incubation (as described above), the plate was centrifuged at 4000 rpm for 5 minutes and the supernatant removed. 1.2 nil fresh M9-MOPS-antibiotic was added to each well, and incubated ON as described above. After the incubation, an aliquot of each culture was used to measure OD at 600 nm. The 96 well plate was centrifuged and the supernatants vacuum-filtered with a 96 well plate AcroPrep filter to remove remaining cells. The filtrate was collected and analyzed by LCMS or HPLC.

[0840] Table 57 provides exemplary ALD sequences based on homology. One skilled in the art will readily understand that such sequences can be analyzed with routine and well known methods for aligning sequences (for example BLAST, blast.ncbi nlm nih gov; Altschul et al., “J. Mol. Biol. 215:403-410 (1990)). Such alignments can provide information on conserved residues that can be utilized to identify a consensus sequence for preserving enzyme activity as well as positions for generating further enzyme variants.

TABLE 57
Exemplary ALD sequences.

| | |
|---|---|
| NAD-dependent aldehyde dehydrogenase [Clostridium saccharoperbutylacetonicum N1-4(HMT)] >gb\|AGF59413.1\|NAD- | YP_007458667.1 |
| dependent aldehyde dehydrogenase [Clostridium saccharoperbutylacetonicum N1-4(HMT)] | GI: 451822466 |
| | (SEQ ID NO: 439) |
| butyraldehyde dehydrogenase [Clostridium saccharoperbutylacetonicum N1-4(HMT)] | AAP42563.1 |
| | GI: 31075383 |
| | (SEQ ID NO: 440) |
| aldehyde dehydrogenase [Clostridium beijerinckii NCIMB 8052] >gb\|AAQ12068.1\|coenzyme A acylating aldehyde | YP_001310903.1 |
| dehydrogenase [Clostridium beijerinckii NCIMB 8052] >gb\|AAQ12072.1\|coenzyme A acylating aldehyde dehydrogenase | GI: 150018649 |
| [Clostridium beijerinckii] >gb\|AAT48939.1\|aldehyde dehydrogenase [Clostridium beijerinckii] >gb\|AAT66436.1\|coenzyme A- | (SEQ ID NO: 441) |
| acylating aldehyde dehydrogenase [Clostridium beijerinckii] >gb\|ABR35947.1\|aldehyde dehydrogenase [Clostridium beijerinckii | |
| NCIMB 8052] | |
| coenzyme A acylating aldehyde dehydrogenase [Clostridium beijerinckii] | AAD31841.1 |
| | GI: 4884855 |
| | (SEQ ID NO: 442) |
| Acetaldehyde dehydrogenase (acetylating) [Clostridium sp. DL-VIII] >gb\|EHJ00721.1\|Acetaldehyde dehydrogenase | ZP_09206127.1 |
| (acetylating) [Clostridium sp. DL-VIII] | GI: 359413662 |
| | (SEQ ID NO: 443) |
| coenzyme A acylating aldehyde dehydrogenase [Clostridium saccharobutylicum] | CAQ57983.1 |
| | GI: 189310620 |
| | (SEQ ID NO: 444) |
| ethanolamine utilization protein EutE [Clostridium botulinum B str. Eklund 17B] >gb\|ACD24339.1\|ethanolamine utilization | YP_001886323.1 |
| protein EutE [Clostridium botulinum B str. Eklund 17B] | GI: 187934965 |
| | (SEQ ID NO: 445) |
| Aldehyde Dehydrogenase [Caldalkalibacillus thermarum TA2.A1] >gb\|EGL82399.1\|Aldehyde Dehydrogenase | ZP_08533507.1 |
| [Caldalkalibacillus thermarum TA2.A1] | GI: 335040377 |
| | (SEQ ID NO: 446) |
| Aldehyde Dehydrogenase [Pelosinus fermentans DSM 17108] >ref\|ZP_15517111.1\|Aldehyde Dehydrogenase [Pelosinus | ZP_10327808.1 |
| fermentans B4] >ref\|ZP_15521980.1\|Aldehyde Dehydrogenase [Pelosinus fermentans B3] >ref\|ZP_15526533.1\|Aldehyde | GI: 392962372 |
| Dehydrogenase [Pelosinus fermentans A12] >ref\|ZP_15534416.1\|Aldehyde Dehydrogenase [Pelosinus fermentans A11] | (SEQ ID NO: 447) |
| >gb\|EIW18982.1\|Aldehyde Dehydrogenase [Pelosinus fermentans B4] >gb\|EIW21808.1\|Aldehyde Dehydrogenase [Pelosinus | |
| fermentans A11] >gb\|EIW29163.1\|Aldehyde Dehydrogenase [Pelosinus fermentans DSM 17108] >gb\|EIW35484.1\|Aldehyde | |
| Dehydrogenase [Pelosinus fermentans B3] >gb\|EIW36902.1\|Aldehyde Dehydrogenase [Pelosinus fermentans A12] | |
| NAD-dependent aldehyde dehydrogenase [Thermoanaerobacterium thermosaccharolyticum M0795] >gb\|AGB19701.1\|NAD- | YP_007299398.1 |
| dependent aldehyde dehydrogenase [Thermoanaerobacterium thermosaccharolyticum M0795] | GI: 433655690 |
| | (SEQ ID NO: 448) |
| Aldehyde Dehydrogenase [Pelosinus fermentans JBW45] >gb\|EIW48189.1\|Aldehyde Dehydrogenase [Pelosinus fermentans | ZP_15537951.1 |
| JBW45] | GI: 421076976 |
| | (SEQ ID NO: 449) |
| aldehyde dehydrogenase family protein [Desulfosporosinus sp. OT] >gb\|EGW35902.1\|aldehyde dehydrogenase family protein | ZP_08814704.1 |
| [Desulfosporosinus sp. OT] | GI: 345862484 |
| | (SEQ ID NO: 450) |
| hypothetical protein CLOSTMETH_00016 [Clostridium methylpentosum DSM 5476] >gb\|EEG32278.1\|hypothetical protein | ZP_03705305.1 |
| CLOSTMETH_00016 [Clostridium methylpentosum DSM 5476] | GI: 225016072 |
| | (SEQ ID NO: 451) |
| aldehyde dehydrogenase [Thermoanaerobacterium saccharolyticum JW/SL-YS485] >gb\|AFK85255.1\|Aldehyde Dehydrogenase | YP_006390854.1 |
| [Thermoanaerobacterium saccharolyticum JW/SL-YS485] | G: 390933349 |
| | (SEQ ID NO: 452) |
| acetaldehyde dehydrogenase [Thermoanaerobacterium xylanolyticum LX-11] >gb\|AEF18105.1\|Acetaldehyde dehydrogenase | YP_004471777.1 |
| (acetylating) [Thermoanaerobacterium xylanolyticum LX-11] | G: 333897903 |
| | (SEQ ID NO: 45.3) |
| aldehyde dehydrogenase EutE [Acetonema longum DSM 6540] >gb\|EGO64744.1\|aldehyde dehydrogenase EutE [Acetonema | ZP_08623980.1 |
| longum DSM 6540] | GI: 338811775 |
| | (SEQ ID NO: 454) |
| ethanolamine utilization protein eutE [Geobacillus thermoglucosidans TNO-09.020] >gb\|EID44455.1\|ethanolamine utilization | ZP_17694107.1 |
| protein eutE [Geobacillus thermoglucosidans TNO-09.020] | GI: 423719925 |
| | (SEQ ID NO: 455) |
| aldehyde dehydrogenase [Geobacillus sp. Y4.1MC1] >gb\|ADP74637.1\|Aldehyde Dehydrogenase [Geobacillus sp. Y4.1MC1] | YP_003989248.1 |
| | GI: 312110932 |
| | (SEQ ID NO: 456) |
| acetaldehyde dehydrogenase [Geobacillus thermoglucosidasius C56-Y593] >gb\|AEH47899.1\|Acetaldehyde dehydrogenase | YP_004587980.1 |
| (acetylating) [Geobacillus thermoglucosidasius C56-YS93] | GI: 336235364 |
| | (SEQ ID NO: 457) |
| aldehyde dehydrogenase EutE [Bacillus azotoformans LMG 9581] >gb\|EKN64472.1\|aldehyde dehydrogenase EutE [Bacillus | ZP_11313951.1 |
| azotoformans LMG 9581] | GI: 410460269 |
| | (SEQ ID NO: 458) |
| putative aldehyde dehydrogenase, ethanolamine utilization protein [[Clostridium] sticklandii] >emb\|CBH20800.1\|putative | YP_003935705.1 |
| aldehyde dehydrogenase, ethanolamine utilization protein [[Clostridium] sticklandii] | GI: 310657984 |
| | (SEQ ID NO: 459) |
| Aldehyde Dehydrogenase [Thermincola potens JR] >gb\|ADG81503.1\|Aldehyde Dehydrogenase [Thermincola potens JR] | YP_003639404.1 |
| | GI: 296132157 |
| | (SEQ ID NO: 460) |
| CoA-dependent propionaldehyde dehydrogenase [Clostridium sp. D5] >gb\|EGB92558.1\|CoA-dependent propionaldehyde | ZP_08130302.1 |
| dehydrogenase [Clostridium sp. D5] | GI: 325263568 |
| | (SEQ ID NO: 461) |
| acetaldehyde dehydrogenase (acetylating) [Fusobacterium sp. 3_1_33] >gb\|EEW94895.1\|acetaldehyde dehydrogenase | ZP_05815063.1 |
| (acetylating) [Fusobacterium sp. 3_1_33] | GI: 260494934 |
| | (SEQ ID NO: 462) |
| ethanolamine utilization protein eutE [Fusobacterium sp. 7_1] >gb\|EEO43449.1\|ethanolamine utilization protein eutE | ZP_04573939.1 |
| [Fusobacterium sp. 7_1] | GI: 237743458 |
| | (SEQ ID NO: 463) |
| NAD-dependent aldehyde dehydrogenases [Ruminococcus sp. SR1/5] >emb\|CBL20089.1\|NAD-dependent aldehyde | YP_007783752.1 |
| dehydrogenases [Ruminococcus sp. SR1/5] | GI: 479153977 |
| | (SEQ ID NO: 464) |
| hypothetical protein HMPREF9942_01197 [Fusobacterium nucleatum subsp. animalis F0419] >gb\|EHO78009.1\|hypothetical | ZP_17125059.1 |
| protein HMPREF9942_01197 [Fusobacterium nucleatum subsp. animalis F0419] | GI: 423137416 |
| | (SEQ ID NO: 465) |
| possible aldehyde dehydrogenase [Fusobacterium nucleatum subsp. polymorphum ATCC 10953] >gb\|EDK87521.1\|possible | ZP_04969437.1 |
| aldehyde dehydrogenase [Fusobacterium nucleatum subsp. polymorphum ATCC 10953] | GI: 254302079 |
| | (SEQ ID NO: 466) |
| ethanolamine utilization protein eutE [Fusobacterium sp. D11] >gb\|EFD80567.1\|ethanolamine utilization protein eutE | ZP_06524378.1 |
| [Fusobacterium sp. D11] | GI: 289765000 |
| | (SEQ ID NO: 467) |
| aldehyde dehydrogenase EutE [Fusobacterium nucleatum ChDC F128] >gb\|EJU08233.1\|aldehyde dehydrogenase EutE | ZP_15972610.1 |
| [Fusobacterium nucleatum ChDC F128] | GI: 421526001 |
| | (SEQ ID NO: 468) |
| CoA-dependent propionaldehyde dehydrogenase [Fusobacterium nucleatum subsp. polymorphum F0401] >gb\|EHG19190.1\| | ZP_16419680.1 |
| CoA-dependent propionaldehyde dehydrogenase [Fusobacterium nucleatum subsp. polymorphum F0401] | GI: 422338720 |
| | (SEQ ID NO: 469) |
| CoA-dependent propionaldehyde dehydrogenase [Fusobacterium sp. 11_3_2] >gb\|EGN65750.1\|CoA-dependent | ZP_08600044.1 |
| propionaldehyde dehydrogenase [Fusobacterium sp. 11_3_2] | GI: 336419790 |
| | (SEQ ID NO: 470) |
| hypothetical protein CLOSTASPAR_02210 [Clostridium asparagiforme DSM 15981] >gb\|EEG55710.1\|hypothetical protein | ZP_03758198.1 |
| CLOSTASPAR_02210 [Clostridium asparagiforme DSM 15981] | GI: 225388474 |
| | (SEQ ID NO: 471) |
| aldehyde dehydrogenase [Clostridium phytofermentans ISDg] >gb\|ABX41556.1\|Aldehyde Dehydrogenase_[Clostridium | YP_001558295.1 |
| phytofermentans ISDg] | GI: 160879327 |
| | (SEQ ID NO: 472) |
| CoA-dependent propionaldehyde dehydrogenase [Fusobacterium sp. 1_1_41FAA] >gb\|EFG28139.1\|CoA-dependent | ZP_06748808.1 |
| propionaldehyde dehydrogenase [Fusobacterium sp. 1_1_41FAA] | GI: 294783484 |
| | (SEQ ID NO: 473) |
| hypothetical protein HMPREF0991_01940 [Lachnospiraceae bacterium 2_1_58FAA] >gb\|EGN47419.1\|hypothetical protein | ZP_08612821.1 |
| HMPREF0991_01940 [Lachnospiraceae bacterium2_1_58FAA] | GI: 336432991 |
| | (SEQ ID NO: 474) |
| hypothetical protein RUMGNA_01022 [Ruminococcus gnavus ATCC 29149] >gb\|EDN78612.1\|aldehyde dehydrogenase | ZP_02040258.1 |
| (NAD) family protein [Ruminococcus gnavus ATCC 29149] | GI: 154503198 |
| | (SEQ ID NO: 475) |
| NAD-dependent aldehyde dehydrogenases [Ruminococcus obeum A2-162] >emb\|CBL23217.1\|NAD-dependent aldehyde | YP_007805199.1 |
| dehydrogenases [Ruminococcus obeum A2-162] | GI: 479177598 |
| | (SEQ ID NO: 476) |
| aldehyde dehydrogenase [Clostridium saccharolyticum WM1] >gb\|ADL04402.1\|Aldehyde Dehydrogenase [Clostridium | YP_003822025.1 |
| saccharolyticum WM1] | GI: 302386203 |
| | (SEQ ID NO: 477) |
| aldehyde dehydrogenase family protein [Flavonifractor plautii ATCC 29863] >gb\|EHM40040.1\|aldehyde dehydrogenase family | ZP_09385796.1 |
| protein [Flavonifractor plautii ATCC 29863] | GI: 365844997 |
| | (SEQ ID NO: 478) |
| hypothetical protein RUMOBE_00094 [Ruminococcus obeum ATCC 29174] >gb\|EDM88971.1\|aldehyde dehydrogenase | ZP_01962381.1 |
| (NAD) family protein [Ruminococcus obeum ATCC 29174] | GI: 153809713 |
| | (SEQ ID NO: 479) |
| Aldehyde Dehydrogenase [Clostridium carboxidivorans P7] >ref\|ZP_06856832.1\|aldehyde dehydrogenase (NAD) family protein | ZP_05391061.1 |
| [Clostridium carboxidivorans P7] >gb\|EET88516.1\|Aldehyde Dehydrogenase [Clostridium carboxidivorans P7] | GI: 255524100 |
| >gb\|EFG86154.1\|aldehyde dehydrogenase (NAD) family protein [Clostridium carboxidivorans P7] >gb\|ADO12117.1\|CoA- | (SEQ ID NO: 480) |
| acylating aldehyde dehydrogenase [Clostridium carboxidivorans P7] | |
| hypothetical protein FUAG_00592 [Fusobacterium ulcerans ATCC 49185] >gb\|EFS25077.1\|hypothetical protein FUAG_00592 | ZP_10974295.1 |
| [Fusobacterium ulcerans ATCC 49185] | GI: 404368948 |
| | (SEQ ID NO: 481) |
| hypothetical protein HMPREF0402_00608 [Fusobacterium sp. 12_1B] >gb\|EHO83590.1\|hypothetical protein | ZP_09586735.1 |
| HMPREF0402_00608 [Fusobacterium sp. 12_1B] | GI: 373496187 |
| | (SEQ ID NO: 482) |
| aldehyde dehydrogenase [Roseburia inulinivorans DSM 16841] | ABC25528.1 |
| | GI: 83596371 |
| | (SEQ ID NO: 483) |
| Aldehyde Dehydrogenase [Clostridium carboxidivorans P7] >ref\|ZP_06855343.1\|aldehyde dehydrogenase (NAD) family protein | ZP_05393779.1 |
| [Clostridium carboxidivorans P7] >gb\|EET85788.1\|Aldehyde Dehydrogenase [Clostridium carboxidivorans P7] | GI: 255526882 |
| >gb\|EFG87815.1\|aldehyde dehydrogenase (NAD) family protein [Clostridium carboxidivorans P7] | (SEQ ID NO: 484) |
| NAD-dependent aldehyde dehydrogenases [Clostridium cf. saccharolyticum K10] >emb\|CBK77787.1\|NAD-dependent | YP_007849785.1 |
| aldehyde dehydrogenases [Clostridium cf. saccharolyticum K10] | GI: 479338567 |
| | (SEQ ID NO: 485) |
| ethanolamine utilization protein eutE [Fusobacterium varium ATCC 27725] >gb\|EES62817.1\|ethanolamine utilization protein | ZP_08693593.1 |
| eutE [Fusobacterium varium ATCC 27725] | GI: 340756989 |
| | (SEQ ID NO: 486) |
| aldehyde dehydrogenase family protein [Clostridium celatum DSM 1785] >gb\|EKY29259.1\|aldehyde dehydrogenase family | ZP_19296595.1 |
| protein [Clostridium celatum DSM 1785] | GI: 429764274 |
| | (SEQ ID NO: 487) |
| propionaldehyde dehydrogenase [Clostridium sp. ASF502] | EMZ20682.1 |
| | GI: 476613570 |
| | (SEQ ID NO: 488) |
| hypothetical protein HMPREF0988_02063 [Lachnospiraceae bacterium 1_4_56FAA] >gb\|EGN36620.1\|hypothetical protein | ZP_08616478.1 |
| HMPREF0988_02063 [Lachnospiraceae bacterium 1_4_56FAA] | GI: 336436768 |
| | (SEQ ID NO: 489) |
| hypothetical protein HMPREF0994_03038 [Lachnospiraceae bacterium 3_1_57FAA_CT1] >gb\|EGN40215.1\|hypothetical | ZP_08607032.1 |
| protein HMPREF0994_03038 [Lachnospiraceae bacterium 3_1_57FAA_CT1] | GI: 336436768 |
| | (SEQ ID NO: 490) |
| aldehyde dehydrogenase [Ruminococcus sp. 5_1_39B_FAA] >gb\|EES77009.1\|aldehyde dehydrogenase [Ruminococcus sp. | ZP_04856816.1 |
| 5_1_39BFAA] | GI: 253579547 |
| | (SEQ ID NO: 491) |
| CoA-dependent proprionaldehyde dehydrogenase PduP [Acetobacterium woodii DSM 1030] >gb\|AFA49334.1\|CoA-dependent | YP_005270223.1 |
| proprionaldehyde dehydrogenase PduP [Acetobacterium woodii DSM 1030] | GI: 379012411 |
| | (SEQ ID NO: 492) |
| ethanolamine utilization protein EutE [Clostridium botulinum E1 str. ‘BoNT E Beluga’] >gb\|EES50221.1\|ethanolamine utilization | ZP_04822936.1 |
| protein EutE [Clostridium botulinum E1 str. ‘BoNT E Beluga’] | GI: 251780016 |
| | (SEQ ID NO: 493) |
| ethanolamine utilization protein EutE [Clostridium botulinum B str. Eklund 17B] >gb\|ACD22415.1\|ethanolamine utilization | YP_001885942.1 |
| protein EutE [Clostridium botulinum B str. Eklund 17B] | GI: 187933041 |
| | (SEQ ID NO: 494) |
| ethanolamine utilization protein EutE [Clostridium botulinum E3 str. Alaska E43] >gb\|ACD53952.1\|ethanolamine utilization | YP_001921227.1 |
| protein EutE [Clostridium botulinum E3 str. Alaska E43] | GI: 188590535 |
| | (SEQ ID NO: 495) |
| propionaldehyde dehydrogenase [Eubacterium plexicaudatum ASF492] | EMZ27833.1 |
| | GI: 476621007 |
| | (SEQ ID NO: 496) |
| Aldehyde Dehydrogenase [Thermosediminibacter oceani DSM 16646] >gb\|ADL07333.1\|Aldehyde Dehydrogenase | YP_003824956.1 |
| [Thermosediminibacter oceani DSM 16646] | GI: 302389135 |
| | (SEQ ID NO: 497) |
| hypothetical protein HMPREF1090_01637 [Clostridium clostridioforme 90A8] | ENZ17687.1 |
| | GI: 480674262 |
| | (SEQ ID NO: 498) |
| hypothetical protein HMPREF9467_03550 [Clostridium clostridioforme 2_1_49FAA] >gb\|EHG29726.1\|hypothetical protein | ZP_09116578.1 |
| HMPREF9467_03550 [Clostridium clostridioforme 2_1_49FAA] | GI: 357055510 |
| | (SEQ ID NO: 499) |
| Aldehyde Dehydrogenase [Ilyobacter polytropus DSM 2926] >gb\|ADO84118.1\|Aldehyde Dehydrogenase [Ilyobacter | YP_003968466.1 |
| polytropus DSM 2926] | GI: 310780134 |
| | (SEQ ID NO: 500) |
| hypothetical protein GCWU000342_00651 [Shuttleworthia satelles DSM 14600] >gb\|EEP29295.1\|hypothetical protein | ZP_04454656.1 |
| GCWU000342_00651 [Shuttleworthia satelles DSM 14600] | GI: 229828587 |
| | (SEQ ID NO: 501) |
| aldehyde dehydrogenase [Clostridium beijerinckii NCIMB 8052] >gb\|ABR36155.1\|aldehyde dehydrogenase [Clostridium | YP_001311111.1 |
| beijerinckii NCIMB 8052] | GI: 150018857 |
| | (SEQ ID NO: 502) |
| propionaldehyde dehydrogenase [Clostridium clostridioforme CM201] >gb\|ENZ04399.1\|propionaldehyde dehydrogenase | ENY83847.1 |
| [Clostridium clostridioforme 90B1] >gb\|ENZ17257.1\|propionaldehyde dehydrogenase [Clostridium clostridioforme 90A8] | GI: 480639338 |
| >gb\|ENZ22132.1\|propionaldehyde dehydrogenase [Clostridium clostridioforme 90A3] >gb\|ENZ29200.1\|propionaldehyde | (SEQ ID NO: 503) |
| dehydrogenase [Clostridium clostridioforme 90A1] >gb\|ENZ64224.1\|propionaldehyde dehydrogenase [Clostridium | |
| clostridioforme 90A4] >gb\|ENZ70105.1\|propionaldehyde dehydrogenase [Clostridium clostridioforme 90A6] | |
| aldehyde dehydrogenase (NAD) domain protein [Clostridium sp. MSTE9] >gb\|EJF40077.1\|aldehyde dehydrogenase (NAD) | ZP_14663848.1 |
| domain protein [Clostridium sp. MSTE9] | GI: 420157008 |
| | (SEQ ID NO: 504) |
| hypothetical protein CLOBOL_07248 [Clostridium bolteae ATCC BAA-613] >gb\|EDP12494.1\|hypothetical protein | ZP_02089671.1 |
| CLOBOL_07248 [Clostridium bolteae ATCC BAA-613] | GI: 160942363 |
| | (SEQ ID NO: 505) |
| propionaldehyde dehydrogenase [Clostridium bolteae 90B8] >gb\|ENZ57487.1\|propionaldehyde dehydrogenase [Clostridium | ENZ31577.1 |
| bolteae 90A5] >gb\|ENZ67775.1\|propionaldehyde dehydrogenase [Clostridium bolteae 90B7] | GI: 480688660 |
| | (SEQ ID NO: 506) |
| hypothetical protein EUBHAL_00514 [Eubacterium hallii DSM 3353] >gb\|EEG37590.1\|aldehyde dehydrogenase (NAD) family | ZP_03715465.1 |
| protein [Eubacterium hallii DSM 3353] | GI: 225026273 |
| | (SEQ ID NO: 507) |
| CoA-acylating propionaldehyde dehydrogenase [Halanaerobium saccharolyticum subsp. saccharolyticum DSM 6643] | ZP_23773859.1 |
| >emb\|CCU77919.1\|CoA-acylating propionaldehyde dehydrogenase [Halanaerobium saccharolyticum subsp. saccharolyticum | GI: 470960332 |
| DSM 6643] | (SEQ ID NO: 508) |
| hypothetical protein [Eubacterium limosum KIST612] >gb\|ADO39014.1\|hypothetical protein ELI_4072 [Eubacterium limosum | YP_003961977.1 |
| KIST612] | GI: 310829620 |
| | (SEQ ID NO: 509) |
| aldehyde dehydrogenase [Thermoanaerobacter sp. X514] >ref\|ZP_07131928.1\|Aldehyde Dehydrogenase [Thermoanaerobacter | YP_001663556.1 |
| sp. X561] >ref\|YP_003903905.1\|aldehyde dehydrogenase [Thermoanaerobacter sp. X513] >ref\|ZP_08212082.1\|Aldehyde | GI: 167040571 |
| Dehydrogenase [Thermoanaerobacter ethanolicus JW 200] >gb\|ABY93220.1\|aldehyde dehydrogenase [Thermoanaerobacter sp. | (SEQ ID NO: 510) |
| X514] >gb\|EFK84693.1\|Aldehyde Dehydrogenase [Thermoanaerobacter sp. X561] >gb\|ADN54614.1\|Aldehyde | |
| Dehydrogenase [Thermoanaerobacter sp. X513] >gb\|EGD51928.1\|Aldehyde Dehydrogenase [Thermoanaerobacter ethanolicus | |
| JW 200] | |
| aldehyde dehydrogenase [Rhodospirillum rubrum ATCC 11170] >ref\|YP_006047210.1\|aldehyde dehydrogenase EutE | YP_426002.1 |
| [Rhodospirillum rubrum F11] >gb\|ABC21715.1\|Aldehyde dehydrogenase [Rhodospirillum rubrum ATCC 11170] | GI: 83592250 |
| >gb\|AEO47413.1\|aldehyde dehydrogenase EutE [Rhodospirillum rubrum F11] | (SEQ ID NO: 511) |
| CoA-dependent propionaldehyde dehydrogenase [Eubacterium yurii subsp. margaretiae ATCC 43715] >gb\|EFM39950.1\|CoA- | ZP_07453625.1 |
| dependent propionaldehyde dehydrogenase [Eubacterium yurii subsp. margaretiae ATCC 43715] | GI: 306819974 |
| | (SEQ ID NO: 512) |
| aldehyde dehydrogenase (NAD) domain protein [Eubacterium sp. AS15] >gb\|EJP26117.1\|aldehyde dehydrogenase (NAD) | ZP_10828060.1 |
| domain protein [Eubacterium sp. AS15] | GI: 402309064 |
| | (SEQ ID NO: 513) |
| aldehyde dehydrogenase EutE [Vibrio sp. EJY3] >gb\|AEX22176.1\|aldehyde dehydrogenase EutE [Vibrio sp. EJY3] | YP_005023154.1 |
| | GI: 375265711 |
| | (SEQ ID NO: 514) |
| hypothetical protein HMPREF9629_00032 [Eubacteriaceae bacterium ACC19a] >gb\|EHL16790.1\|hypothetical protein | ZP_09320518.1 |
| HMPREF9629_00032 [Eubacteriaceae bacterium ACC19a] | GI: 363893420 |
| | (SEQ ID NO: 515) |
| aldehyde-alcohol dehydrogenase domain protein [Propionibacterium propionicum F0230a] >gb\|AFN47240.1\|aldehyde-alcohol | YP_006513121.1 |
| dehydrogenase domain protein [Propionibacterium propionicum F0230a] | GI: 397671586 |
| | (SEQ ID NO: 516) |
| hypothetical protein HMPREF9628_01348 [Eubacteriaceae bacterium CM5] >gb\|EHL19659.1\|hypothetical protein | ZP_09316712.1 |
| HMPREF9628_01348 [Eubacteriaceae bacterium CM5] | GI: 363889349 |
| | (SEQ ID NO: 517) |
| aldehyde dehydrogenase (NAD) family protein [Eubacteriaceae bacterium OBRC8] >gb\|EJU23517.1\|aldehyde dehydrogenase | ZP_10886417.1 |
| (NAD) family protein [Eubacteriaceae bacterium OBRC8] | GI: 402837902 |
| | (SEQ ID NO: 518) |

Table 58 provides exemplary ALD enzyme variants. Table 58 shows exemplary enzyme variant positions with the corresponding amino acid for a particular position that were identified as providing a desirable activity, including ALD activity, BDO production, and the like. It is understood that the individual ALD variants such as those described in Table 58 can be used alone, or can be combined with any other variant amino acid position, including 2, 3, 4, 5, 6, 7, 8, 9, 10, greater than 10 and up to all variant amino acid positions as disclosed herein, to generate additional variants having desirable activities.

TABLE 58
Exemplary ALD enzyme variants.

| | | | | Exemplary Enzyme | |
|---|---|---|---|---|---|
| | | | | Sequence Indicating | |
| Wild-Type | | | Corresponding Positions | Corresponding | |
| Designation | Wild-Type Sequence | | and Amino Acid Changes | Positions | |
| aldehyde | 1 | MNKDTLIPTT KDLKVKTNGE | D12L, L15P, D3ON, F34K, | 1 | MNKDTLIPTT KLLKVKTNGE |
| dehydrogenase | | NINLKNYKDN SSCFGVFENV | N42D, 144L, A47T, A47V | | NINLKNYKDN SSCKGVFENV |
| [Clostridium | | ENAISSAVHA QKILSLHYTK | (ALTERNATIVE; NOT SHOWN), | | EDALSSTVHA RKILSGACGK |
| beijerinckii] | 61 | EQREKIITEI RKAALQNKEV | D12L, L15P, D30N, F34K, | 61 | EQREKIFSEI AKAALQNKEV |
| ACCESSION: | | LATMILEETH MGRYEDKILK | N42D, 144L, A47T, A47V | | LATMILEETH RGRYEDKILK |
| AAT48939 | | HELVAKYTPG TEDLTTTAWS | (ALTERNATIVE; NOT SHOWN), | | HELRATVTPG TENLTTTAWS |
| VERSION: | 121 | GDNGLTVVEM SPYGVIGAIT | Q51R, Q51K (ALTERNATIVE; | 121 | GDNGLTINAM WAMGPAGAST |
| AAT48939.1 | | PSTNPTETVI CNSIGMIAAG | NOT SHOWN), L56G, H57A, | | PLTNPTETVI CNSIGCIVGG |
| GI: 49036681 | | NAVVFNGHPC AKKCVAFAVE | Y58C, Y58L (ALTERNATIVE; | | NAVAFNPHPC AGKCVAYGVE |
| | 181 | MINKAIISCG GPENLVTTIK | NOT SHOWN), Y58H | 181 | MINMAIKGCG GPLNLVTTIM |
| | | NPTMESLDAI IKHPSIKLLC | (ALTERNATIVE; NOT SHOWN), | | NPTLESLAAI CKHPMIQLLC |
| | | GTGGPGMVKT LLNSGKKAIG | Y58L (ALTERNATIVE; NOT | | GTGGPRLVAV ILQGGKKAIG |
| | 241 | AGAGNPPVIV DDTADIEKAG | SHOWN), T59G, 166F, 1675, | 241 | SSRGNPPTIV DSFADIERTS |
| | | RSIIEGCSFD NNLPCIAEKE | 167A (ALTERNATIVE; NOT | | RSIIISCSLD NNIPCIAETS |
| | | VFVFENVADD LISNMLKNNA | SHOWN), R71A, M91R, | | LFVPENVLKD VISVFLKLNA |
| | 301 | VIINEDQVSK LIDLVLQKNN | V104R, K106T, Y107V, | 301 | VIINEDQVSL LIDLVLAKNN |
| | | ETQEYFINKK WVGKDAKLFL | D113N, V1271, V128N, | | ETQEYFKNKK WVAKDAKLFL |
| | | DEIDVESPSN VKCIICEVNA | E129A, E129G (ALTERNATIVE; | | DEIDVESPWN VKNIACEVNE |
| | 361 | NHPFVMTELM MPILPIVRVK | NOT SHOWN), E129A | 361 | NHPFVMTELL MPILPIVRVK |
| | | DIDEAIKYAK IAEQNRKHSA | (ALTERNATIVE; NOT SHOWN), | | DIYEAIKYAK IAEQPHKFSA |
| | | YIYSKNIDNL NRFEREIDTT | E129Y (ALTERNATIVE; NOT | | MIYSKHIDNL NRFEREIDTT |
| | 421 | IFVKNAKSFA GVGYEAEGFT | SHOWN), E1291 | 421 | IFVKNAKSFA GVGYEAEGFT |
| | | TFTIAGSTGE GITSARNFTR | (ALTERNATIVE; NOT SHOWN), | | TFTIAGSTGE GITSARNFTR |
| | | QRRCVLAG | S131W, P132A, Y133M, | | QRRCVLAG |
| | | (SEQ ID NO: 234) | Y133V (ALTERNATIVE; NOT | | (SEQ ID NO: 241) |
| | | | SHOWN), Y133M | | |
| | | | (ALTERNATIVE; NOT SHOWN), | | |
| | | | V135P, 1136A, 11395, | | |
| | | | 1139T (ALTERNATIVE; NOT | | |
| | | | SHOWN), S142L, M156C, | | |
| | | | A158V, A159G, V164A, | | |
| | | | G167P, K172G, F177Y, | | |
| | | | A178G, K184M, 1187K, | | |
| | | | S188G, E193L, K200M, | | |
| | | | M204L, M204R,(ALTERNATIVE; | | |
| | | | NOT SHOWN), D208A, D208L | | |
| | | | (ALTERNATIVE; NOT SHOWN), | | |
| | | | 1211C, S215M, S215A | | |
| | | | (ALTERNATIVE; NOT SHOWN), | | |
| | | | K217Q, G226R, M227L, M2271 | | |
| | | | (ALTERNATIVE; NOT SHOWN), | | |
| | | | K229A, T230V, T230R | | |
| | | | (ALTERNATIVE; NOT SHOWN), | | |
| | | | T230Q (ALTERNATIVE; NOT | | |
| | | | SHOWN), T230V | | |
| | | | (ALTERNATIVE; NOT SHOWN), | | |
| | | | L2311, N233Q, N233V | | |
| | | | (ALTERNATIVE; NOT SHOWN), | | |
| | | | S234G, S234G (ALTERNATIVE; | | |
| | | | NOT SHOWN), A241S, G242S, | | |
| | | | G242D (ALTERNATIVE; NOT | | |
| | | | SHOWN), A243R, A243N | | |
| | | | (ALTERNATIVE; NOT SHOWN), | | |
| | | | A243E (ALTERNATIVE; NOT | | |
| | | | SHOWN), V248T, D252S, | | |
| | | | T253F, T253L (ALTERNATIVE; | | |
| | | | NOT SHOWN) T253V | | |
| | | | (ALTERNATIVE; NOT SHOWN) | | |
| | | | T253A (ALTERNATIVE; NOT | | |
| | | | SHOWN) K258R, A259T, | | |
| | | | G260S, G260T (ALTERNATIVE; | | |
| | | | NOT SHOWN), G260C | | |
| | | | (ALTERNATIVE; NOT SHOWN), | | |
| | | | G260V (ALTERNATIVE; NOT | | |
| | | | SHOWN), E2651, E265C | | |
| | | | (ALTERNATIVE; NOT SHOWN), | | |
| | | | E265W (ALTERNATIVE; NOT | | |
| | | | SHOWN), E265V | | |
| | | | (ALTERNATIVE; NOT SHOWN), | | |
| | | | G266S, F269L, L2731, | | |
| | | | L273T (ALTERNATIVE; NOT | | |
| | | | SHOWN), L273S | | |
| | | | (ALTERNATIVE; NOT SHOWN), | | |
| | | | L273M (ALTERNATIVE; NOT | | |
| | | | SHOWN), L273N | | |
| | | | (ALTERNATIVE; NOT SHOWN), | | |
| | | | K279T, E280S, V281L, | | |
| | | | F284P, A288L, D289K, | | |
| | | | L291V, N294V, N294D | | |
| | | | (ALTERNATIVE; NOT SHOWN), | | |
| | | | M295F, N298L, K310L, | | |
| | | | K310P (ALTERNATIVE; NOT | | |
| | | | SHOWN), Q317A, Q317T | | |
| | | | (ALTERNATIVE; NOT SHOWN), | | |
| | | | 1327K, G333A, S349W, | | |
| | | | C353N, 1355A, A360E, | | |
| | | | M370L, M370H (ALTERNATIVE; | | |
| | | | NOT SHOWN), D383Y, N395P, | | |
| | | | R396H R396K (ALTERNATIVE; | | |
| | | | NOT SHOWN), R396W | | |
| | | | (ALTERNATIVE; NOT SHOWN), | | |
| | | | R396V (ALTERNATIVE; NOT | | |
| | | | SHOWN), H398F, Y401M, | | |
| | | | N406H | | |
| ethanolamine | 1 | MERNLSVLSQTNDLKITKRT | D13L, 116P, L32K, N40D, | 1 | MERNLSVLSQ TNLKPTKRT |
| utilization | | EGDKSNNKES YLGVFKKVEN | 142L, A45T, A45V | | EGDKSNNKES YKGVFKKVED |
| protein EutE | | AITKAIYAQK KLSLYYTKED | (alternative; not shown), | | ALTKTIYARK KLSGACGKED |
| [Clostridium | 61 | RERIIKSIRK ATLENKEILA | Q49R, 049K (alternative; | 61 | RERFSKSIAK ATLENKEILA |
| botulinum B | | KMIVDETHMG RYEDKILKHE | not shown), L54G, Y55A, | | KMIVDETHRG RYEDKILKHE |
| str. Eklund | | LVAKYTPGTE DLITTAWSGD | Y56C, Y56L (alternative; | | LRATVTPGTE NLITTAWSGD |
| 17B] | 121 | QGLTLVEMSP YGVIGAITPS | not shown), Y56H | 121 | QGLTINAMWA MGPAGASTPL |
| Sequence ID: ref\| | | TNPTETVICN SIGMIAAGDS | (alternative; not shown), | | TNPTETVICN SIGCIVGGDS |
| YP_001886323.1\| | | VVFNGHPGAK KCVAFAVDMI | Y56L (alternative; not | | VAFNPHPGAG KCVAYGVDMI |
| Length: 467 | 181 | NKAVIREGGP ENLVTTVENP | shown), T57G, 164F, 1655, | 181 | NMAVKSEGGP LNLVTTVMNP |
| | | TMESLNVIMK HPYIKLLCGT | 165A (alternative; not | | TLESLAVICK HPMIQLLCGT |
| | | GGPGLIKTLL NSGKKAIGAG | shown), R69A, M89R, | | GGPRLIAVIL QGKKAIGSS |
| | 241 | AGNPPVIVDD SADIDKAAKN | V102R, K104T, Y105V, | 241 | RGNPPTIVDS FADIDRTSKN |
| | | IIEGCSFDNN LPCIAEKEVF | D111N, V1251, V126N, | | IIISCSLDNN IPCIAETSLF |
| | | VFENVANDLI QNMIKNNAVL | E127A, E127G | | VPENVLNKVI QVFIKLNAVL |
| | 301 | INENQVSKLL DLVLLERKDE | (alternative; not shown), | 301 | INENQVSLLL DLVLLARKDE |
| | | TLEYAINKKW VGKDAKLFLD | E127Y (alternative; not not | | TLEYAKNKKW VAKDAKLFLD |
| | | KIGIKASDNV RCIICEVDAN | shown), E1271 (alternative; | | KIGIKASWNV RNIACEVDEN |
| | 361 | HPFVMTELMM PILPIVRVKD | shown), S129W, P130A, | 361 | HPFVMTELLM PILPIVRVKD |
| | | VDEAIECAKT AEQRKRHSAY | Y131M, Y131V (alternative; | | VYEAIECAKT AEQPKRFSAM |
| | | MYSKNIDNLN RFEKEIDTTI | not shown), Y131M | | MYSKHIDNLN RFEKEIDTTI |
| | 421 | FVKNAKSFAG VGFGAEGFTT | (alternative; not shown), | 421 | FVKNAKSFAG VGFGAEGFTT |
| | | FTIAGPTGEG ITSARNFTRQ | V133P, 1134A, 11375, 1137T | | FTIAGPTGEG ITSARNFTRQ |
| | | RRCVLAG | (alternative; not shown), | | RRCVLAG |
| | | (SEQ ID NO: 235) | S140L, M154C, A156V, A157G, | | (SEQ ID NO: 242) |
| | | | V162A, G165P, K170G, F175Y, | | |
| | | | A176G, K182M, 1185K, S186G, | | |
| | | | E191L, K198M, M202L, M202R | | |
| | | | (alternative; not shown), | | |
| | | | N206A, N206L (alternative; | | |
| | | | not shown), M209C, Y213M, | | |
| | | | Y213A (alternative; not | | |
| | | | shown), K215Q, G224R, | | |
| | | | L2251 (alternative; not | | |
| | | | shown), K227A, T228V, | | |
| | | | T228R (alternative; not | | |
| | | | shown), T228Q | | |
| | | | (alternative; not shown), | | |
| | | | T228V (alternative; not | | |
| | | | shown), L2291, N231Q, N231V | | |
| | | | (alternative; not shown), | | |
| | | | S232G, A239S, G240S, G240D | | |
| | | | (alternative; not shown), | | |
| | | | A241R, A241N (alternative; | | |
| | | | not shown), A241E | | |
| | | | (alternative; not shown), | | |
| | | | V246T, D250S, T251F, T251L | | |
| | | | (alternative; not shown), | | |
| | | | T251V (alternative; not | | |
| | | | shown), T251A (alternative; | | |
| | | | not shown), K256R, A257T, | | |
| | | | G258S, G258T (alternative; | | |
| | | | not shown), G260C | | |
| | | | (alternative; not shown), | | |
| | | | G260V (alternative; not | | |
| | | | shown), E2631, E263C | | |
| | | | (alternative; not shown), | | |
| | | | E263W (alternative; not | | |
| | | | shown), E263V | | |
| | | | (alternative; not shown), | | |
| | | | G264S, F267L, L2711, | | |
| | | | L271T (alternative; not | | |
| | | | shown), L271S (alternative; | | |
| | | | not shown), L271M | | |
| | | | (alternative; not shown), | | |
| | | | L271N (alternative; not | | |
| | | | shown), K277T, E278S, | | |
| | | | V279L, F282P, A286L, D287K, | | |
| | | | L289V, N292V, N292D | | |
| | | | (alternative; not shown), | | |
| | | | M293F, N296L, K308L, K308P | | |
| | | | (alternative; not shown), | | |
| | | | E316A, E316T (alternative; | | |
| | | | not shown), 1326K, G332A, | | |
| | | | D348W, C352N, 1354A, A359E, | | |
| | | | M369L, M369H (alternative; | | |
| | | | not shown), D382Y, R394P, | | |
| | | | K395H, K395K (alternative; | | |
| | | | not shown), K395W | | |
| | | | (alternative; not shown), | | |
| | | | K395V (alternative; not | | |
| | | | shown), H397F, Y400M, | | |
| | | | N405H | | |
| aldehyde | 1 | MNKDTLIPTT KDLKVKTNGE | D12L, L15P, D3ON, F34K, | 1 | MNKDTLIPTT KLLKVKTNGE |
| dehydrogenase | | NINLKNYKDN SSCFGVFENV | N42D, 144L, A47T, A47V | | NINLKNYKDN SSCKGVFENV |
| [Clostridium | | ENAISSAVHA QKILSLHYTK | (ALTERNATIVE; NOT SHOWN), | | EDALSSTVHA RKILSGACGK |
| beijerinckii] | 61 | EQREKIITEI RKAALQNKEV | D12L, L15P, D30N, | 61 | EQREKIFSEI AKAALQNKEV |
| ACCESSION: | | LATMILEETH MGRYEDKILK | F34K, N42D, 144L, A47T, | | LATMILEETH RGRYEDKILK |
| AAT48939 | | HELVAKYTPG TEDLTTTAWS | A47V (ALTERNATIVE; NOT | | HELRATVTPG TENLTTTAWS |
| VERSION: | 121 | GDNGLTVVEM SPYGVIGAIT | SHOWN), Q51R, Q51K | 121 | GDNGLTINAM WAMGPAGAST |
| AAT48939.1 | | PSTNPTETVI CNSIGMIAAG | (ALTERNATIVE; NOT SHOWN), | | PLTNPTETVI CNSIGCIVGG |
| GI: 49036681 | | NAVVFNGHPC AKKCVAFAVE | L56G, H57A, Y58C, Y58L | | NAVAFNPHPC AGKCVAYGVE |
| | 181 | MINKAIISCG GPENLVTTIK | (ALTERNATIVE; NOT SHOWN), | 181 | MINMAIKGCG GPLNLVTTIM |
| | | NPTMESLDAI IKHPSIKLLC | Y58H (ALTERNATIVE; NOT | | NPTLESLAAI CKHPMIQLLC |
| | | GTGGPGMVKT LLNSGKKAIG | SHOWN), Y58L | | GTGGPRLVAV ILQGGKKAIG |
| | 241 | AGAGNPPVIV DDTADIEKAG | (ALTERNATIVE; NOT SHOWN), | 241 | SSRGNPPTIV DSFADIERTS |
| | | RSIIEGCSFD NNLPCIAEKE | T59G, 166F, 1675, 167A | | RSIIISCSLD NNIPCIAETS |
| | | VFVFENVADD LISNMLKNNA | (ALTERNATIVE; NOT SHOWN), | | LFVPENVLKD VISVFLKLNA |
| | 301 | VIINEDQVSK LIDLVLQKNN | R71A, M91R, V104R, K106T, | 301 | VIINEDQVSL LIDLVLAKNN |
| | | ETQEYFINKK WVGKDAKLFL | Y107V, D113N, V1271, | | ETQEYFKNKK WVAKDAKLFL |
| | | DEIDVESPSN VKCIICEVNA | V128N, E129A, E129G | | DEIDVESPWN VKNIACEVNE |
| | 361 | NHPFVMTELM MPILPIVRVK | (ALTERNATIVE; NOT SHOWN), | 361 | NHPFVMTELL MPILPIVRVK |
| | | DIDEAIKYAK IAEQNRKHSA | E129A (ALTERNATIVE; NOT | | DIYEAIKYAK IAEQPHKFSA |
| | | YIYSKNIDNL NRFEREIDTT | SHOWN), E129Y | | MIYSKHIDNL NRFEREIDTT |
| | 421 | IFVKNAKSFA GVGYEAEGFT | (ALTERNATIVE; NOT SHOWN), | 421 | IFVKNAKSFA GVGYEAEGFT |
| | | TFTIAGSTGE GITSARNFTR | E1291 (ALTERNATIVE; NOT | | TFTIAGSTGE GITSARNFTR |
| | | QRRCVLAG | SHOWN), S131W, P132A, | | QRRCVLAG |
| | | (SEQ ID NO: 236) | Y133M, Y133V (ALTERNATIVE; | | (SEQ ID NO: 243) |
| | | | NOT SHOWN), Y133M | | |
| | | | (ALTERNATIVE; NOT SHOWN), | | |
| | | | V135P, 1136A, 11395, | | |
| | | | 1139T (ALTERNATIVE; NOT | | |
| | | | SHOWN), S142L, M156C, | | |
| | | | A158V, A159G, V164A, G167P, | | |
| | | | K172G, F177Y, A178G, K184M, | | |
| | | | 1187K, S188G, E193L, K200M, | | |
| | | | M204L, M204R (ALTERNATIVE; | | |
| | | | NOT SHOWN), D208A, D208L | | |
| | | | (ALTERNATIVE; NOT SHOWN), | | |
| | | | 1211C, S215M, S215A | | |
| | | | (ALTERNATIVE; NOT SHOWN), | | |
| | | | K217Q, G226R, M227L, M2271 | | |
| | | | (ALTERNATIVE; NOT SHOWN), | | |
| | | | K229A, T230V, T230R | | |
| | | | (ALTERNATIVE; NOT SHOWN), | | |
| | | | T230Q (ALTERNATIVE; NOT | | |
| | | | SHOWN), T230V (ALTERNATIVE; | | |
| | | | NOT SHOWN), L2311, N233Q, | | |
| | | | N233V (ALTERNATIVE; NOT | | |
| | | | SHOWN), S234G, S234G | | |
| | | | (ALTERNATIVE; NOT SHOWN), | | |
| | | | A241S, G242S, G242D | | |
| | | | (ALTERNATIVE; NOT SHOWN), | | |
| | | | A243R, A243N (ALTERNATIVE; | | |
| | | | NOT SHOWN), A243E | | |
| | | | (ALTERNATIVE; NOT SHOWN), | | |
| | | | V248T, D252S, T253F, T253L | | |
| | | | (ALTERNATIVE; NOT SHOWN), | | |
| | | | T253V (ALTERNATIVE; NOT | | |
| | | | SHOWN), T253A (ALTERNATIVE; | | |
| | | | NOT SHOWN), K258R, A259T, | | |
| | | | G260S, G260T (ALTERNATIVE; | | |
| | | | NOT SHOWN), G260C | | |
| | | | (ALTERNATIVE; NOT SHOWN), | | |
| | | | G260V (ALTERNATIVE; NOT | | |
| | | | SHOWN), E2651, E265C | | |
| | | | (ALTERNATIVE; NOT SHOWN), | | |
| | | | E265W (ALTERNATIVE; NOT | | |
| | | | SHOWN), E265V | | |
| | | | (ALTERNATIVE; NOT SHOWN), | | |
| | | | G266S, F269L, L2731, | | |
| | | | L273T (ALTERNATIVE; NOT | | |
| | | | SHOWN), L273S (ALTERNATIVE; | | |
| | | | NOT SHOWN), L273M | | |
| | | | (ALTERNATIVE; NOT SHOWN), | | |
| | | | L273N (ALTERNATIVE; NOT | | |
| | | | SHOWN), K279T, E280S, | | |
| | | | V281L, F284P, A288L, D289K, | | |
| | | | L291V, N294V, N294D | | |
| | | | (ALTERNATIVE; NOT SHOWN), | | |
| | | | M295F, N298L, K310L, K310P | | |
| | | | (ALTERNATIVE; NOT SHOWN), | | |
| | | | Q317A, Q317T (ALTERNATIVE; | | |
| | | | NOT SHOWN), 1327K, G333A, | | |
| | | | S349W, C353N, 1355A, | | |
| | | | A360E, M370L, M370H | | |
| | | | (ALTERNATIVE; NOT SHOWN), | | |
| | | | D383Y, N395P, R396H, R396K | | |
| | | | (ALTERNATIVE; NOT SHOWN), | | |
| | | | R396W (ALTERNATIVE; NOT | | |
| | | | SHOWN), R396V (ALTERNATIVE; | | |
| | | | NOT SHOWN), H398F, Y401M, | | |
| | | | N406H | | |
| AD-dependent | 1 | MIKDTLVSIT KDLKLKTNVE | D12L, L15P, D3ON, F34K, | 1 | MIKDTLVSIT KLLKPKTNVE |
| aldehyde | | NANLKNYKDD SSCFGVFENV | N42D, 144L, A47T, A47V | | NANLKNYKDN SSCKGVFENV |
| dehydrogenase | | ENAISNAVHA QKILSLHYTK | (alternative; not shown), | | EDALSNTVHA RKILSGACGK |
| [Clostridium | 61 | EQREKIITEI RKAALENKEI | Q51R, Q51K (alternative; | 61 | EQREKFSTEI AKAALENKEI |
| saccharoper- | | LATMILEETH MGRYEDKILK | not shown), L56G, H57A, | | LATMILEETH RGRYEDKILK |
| butylacetonicum | | HELVAKYTPG TEDLTTTAWS | Y58C, Y58L (alternative; | | HELRATVTPG TENLTTTAWS |
| N1-4(HMT)] | 121 | GDNGLTVVEM SPYGVIGAIT | not shown), Y58H | 121 | GDNGLTINAM WAMGPAGAST |
| Sequence ID: | | PSTNPTETVI CNSIGMIAAG | (alternative; not shown), | | PLTNPTETVI CNSIGCIVGG |
| ref\|YP_007458667.1\| | | NTVVFNGHPG AKKCVAFAVE | Y58L (alternative; not | | NTVAFNPHPG AGKCVAYGVE |
| Length: 468 | 181 | MINKAIISCG GPENLVTTIK | shown), T59G, 166F, 1675, | 181 | MINMAIKGCG GPLNLVTTIM |
| | | NPTMDSLDAI IKHPSIKLLC | 167A (alternative; not | | NPTLDSLAAI CKHPMIQLLC |
| | | GTGGPGMVKT LLNSGKKAIG | shown), R71A, M91R, | | GTGGPRLVAV ILQGGKKAIG |
| | 241 | AGAGNPPVIV DDTADIEKAG | V104R, K106T, Y107V, | 241 | SSRGNPPTIV DSFADIERTG |
| | | KSIIEGCSFD NNLPCIAEKE | D113N, V1271, V128N, | | KSIIISCSLD NNIPCIAETS |
| | | VFVFENVADD LISNMLKNNA | E129A, E129G (alternative; | | LFVPENVLKD VISVFLKLNA |
| | 301 | VIINEDQVSK LIDLVLQKNN | not shown), E129Y | 301 | VIINEDQVSL LIDLVLAKNN |
| | | ETQEYSINKK WVGKDAKLFL | (alternative; not shown), | | ETQEYSKNKK WVAKDAKLFL |
| | | DEIDVESPSS VKCIICEVSA | E1291 (alternative; not | | DEIDVESPWS VKCIACEVSE |
| | 361 | SHPFVMTELM MPILPIVRVK | shown), S131W, P132A, | 361 | SHPFVMTELL MPILPIVRVK |
| | | DIDEAIEYAK IAEQNRKHSA | Y133M, Y133V (alternative; | | DIYEAIEYAK IAERPHKFSA |
| | | YIYSKNIDNL NRFEREIDTT | not shown), Y133M | | MIYSKHIDNL WRFERGADST |
| | 421 | IFVKNAKSFA GVGYEAEGFT | (alternative; not shown), | 421 | IFVKNGLSLA GVGYEAPGFT |
| | | TFTIAGSTGE GITSARNFTR | V135P, 1136A, 11395, 1139T | | SFTIAVPTGE GMTSAANFTR |
| | | QRRCVLAG | (alternative; not shown), | | QRRTVNAN |
| | | (SEQ ID NO: 237) | S142L, M156C, A158V, A159G, | | (SEQ ID NO: 244) |
| | | | V164A, G167P, K172G, F177Y, | | |
| | | | A178G, K184M, 1187K, S188G, | | |
| | | | E193L, K200M, M204L, M204R | | |
| | | | (alternative; not shown), | | |
| | | | D208A, D208L (alternative; | | |
| | | | not shown), 1211C, S215M, | | |
| | | | S215A (alternative; not | | |
| | | | shown), K217Q, G226R, | | |
| | | | M227L, M2271 (alternative; | | |
| | | | not shown), K229A, T230V, | | |
| | | | T230R (alternative; not | | |
| | | | shown), T230Q (alternative; | | |
| | | | not shown), T230V | | |
| | | | (alternative; not shown), | | |
| | | | L2311, N233Q, N233V | | |
| | | | (alternative; not shown), | | |
| | | | S234G, A241S, A241S | | |
| | | | (alternative; not shown), | | |
| | | | G242S, G242D (alternative; | | |
| | | | not shown), A243R, A243N | | |
| | | | (alternative; not shown), | | |
| | | | A243E (alternative; not | | |
| | | | shown), V248T, D252S, | | |
| | | | T253F, T253V (alternative; | | |
| | | | not shown), T253L | | |
| | | | (alternative; not shown), | | |
| | | | T253A (alternative; not | | |
| | | | shown), K258R, A259T, | | |
| | | | G260S, G260T (alternative; | | |
| | | | not shown), G260C | | |
| | | | (alternative; not shown), | | |
| | | | G260V (alternative; not | | |
| | | | shown), E2651, E265C | | |
| | | | (alternative; not shown), | | |
| | | | E265W (alternative; not | | |
| | | | shown), E265V | | |
| | | | (alternative; not shown), | | |
| | | | G266S, F269L, L2731, | | |
| | | | L273T, L273S (alternative; | | |
| | | | not shown), L273M | | |
| | | | (alternative; not shown), | | |
| | | | L273T (alternative; not | | |
| | | | shown), L273N | | |
| | | | (alternative; not shown), | | |
| | | | K279T, E280S, V281L, | | |
| | | | F284P, A288L, D289K, | | |
| | | | L291V, N294V, N294D | | |
| | | | (alternative; not shown), | | |
| | | | M295F, N298L, K310L, K310P | | |
| | | | (alternative; not shown), | | |
| | | | Q317A, Q317T (alternative; | | |
| | | | not shown), 1327K, G333A, | | |
| | | | S349W, C353N, 1355A, A360E, | | |
| | | | M370L, M370H (alternative; | | |
| | | | not shown), D383Y, N395P, | | |
| | | | R396H, R396K (alternative; | | |
| | | | not shown),R396W | | |
| | | | (alternative; not shown), | | |
| | | | R396V (alternative; not | | |
| | | | shown), H398F, Y401M, | | |
| | | | N406H | | |
| Aldehyde | 1 | MSIDQALIEK ITLEILTKMQ | E40D, V42L, A45T, A45V | 1 | MSIDQALIEK ITLEILTKMQ |
| Dehydrogenase | | TGAKAAPAGY GDGIFETVDE | (alternative; not shown), | | TGAKAAPAGY GDGIFETVDD |
| [Pelosinus | | AVAAARKAYQ ELKTLSLEKR | Y49R, Y49K (alternative; | | ALAATRKARQ ELKGCGLEKR |
| fermentans | 61 | EVLIKAMRDV AYENATILAQ | not shown), T54G, L55C, | 61 | EVFSKAMADV AYENATILAQ |
| JBW45] | | MAVDESGMGR VSDKIIKNQV | L55H (alternative; not | | MAVDESGRGR VSDKIIKNQV |
| Sequence ID: | | AALKTPGTED LTTQAWSGDN | shown), L55L (alternative; | | RATVTPGTEN LTTQAWSGDN |
| ref\|ZP_15537951.1\| | 121 | GLTLIEMGPY GVIGAITPTT | not shown), S56G, L63F, | 121 | GLTINAMWAM GPAGASTPLT |
| Length: 480 | | NPTETVICNG IGMIAAGNTV | 1645, 164A (alternative; | | NPTETVICNG IGCIVGGNTA |
| | | FFSPHPTAKN TSMKIITLLN | not shown), R68A, M88R, | | FFSPHPTAGN TSMYGITLLN |
| | 181 | QAIVKAGGPN NLLTSVANPS | A101R, L103T, K104V, | 181 | MAIKGAGGPL NLLTSVMNPS |
| | | IKAANEMMKH PGINMLVATG | D110N, L1241, 1125N, | | LKAAAEMCKH PMIQMLVATG |
| | | GPGVVKAVLS SGKKAIGAGA | E126A, E126G (alternative; | | GPRLVAVILQ GGKKAIGSSR |
| | 241 | GNPPVIVDET ADIEKAARDI | not shown), E126Y | 241 | GNPPTIVSEF ADIERTSRDI |
| | | VAGCSFDNNL PCIAEKEVIA | (alternative; not shown), | | VISCSLDNNI PCIAETSLIA |
| | | IGSIADRLIT YMQKYGAYLI | E1261 (alternative; not | | PGSILKRVIT VFQKLGAYLI |
| | 301 | SGSNIDRLLN VIMTVQEEKI | shown), G128W, P129A, | 301 | SGSNIDRLLN VIMAVQEEKI |
| | | AEGCTDKPKR SYGINKDYVG | Y130M, Y130V (alternative; | | AEGCTDKPKR SYGKNKDYVA |
| | | KDAKYLLSKI GIDVPDSVRV | not shown), V132P, 1133A, | | KDAKYLLSKI GIDVPDWVRN |
| | 361 | VLCETPADHP FVIEELMMPV | 11365, 1136T (alternative; | 361 | VACETPEDHP FVIEELHMPV |
| | | LPVVQVKDID EAIEVAVRVE | not shown), T139L, M153C, | | LPVVQVKYID EAIEVAVRVE |
| | | HGNRHTAAMH SKNVDHLTRF | A155V, A156G, V160A, | | HPHRFTAMMH SKHVDHLTRF |
| | 421 | ARAVETTIFV KNAPSYAGIG | K169G, K174Y, 1175G, | 421 | ARAVETTIFV KNAPSYAGIG |
| | | VGGEGFTSFT LAGPTGEGIT | Q181M, V184K, K185G, | | VGGEGFTSFT LAGPTGEGIT |
| | | SPRSFTRQRR CVLVDAFSIV | N190L, A197M, 1201L, | | SPRSFTRQRR CVLVDAFSIV |
| | | (SEQ ID NO: 238) | 1201R (alternative; not | | (SEQ ID NO: 245) |
| | | | shown), N205A, N205L | | |
| | | | (alternative; not shown), | | |
| | | | M208C, G212M, G212A | | |
| | | | (alternative; not shown), | | |
| | | | N214Q, G223R, V224L, | | |
| | | | V2241 (alternative; not | | |
| | | | shown), K226A, A227V, | | |
| | | | A227R (alternative; not | | |
| | | | shown), A227Q | | |
| | | | (alternative; not shown), | | |
| | | | A227V (alternative; not | | |
| | | | shown), V2281, S230Q, | | |
| | | | S230V (alternative; not | | |
| | | | shown), S231G, S231G | | |
| | | | (alternative; not shown), | | |
| | | | A238S, G239S, G239D | | |
| | | | (alternative; not shown), | | |
| | | | A240R, A240N | | |
| | | | (alternative; not shown), | | |
| | | | A240E (alternative; not | | |
| | | | shown), V245T, D248S, | | |
| | | | T250F, T250L (alternative; | | |
| | | | not shown), T250V | | |
| | | | (alternative; not shown), | | |
| | | | T250A (alternative; not | | |
| | | | shown), K255R, A256T, | | |
| | | | A257S, A257T (alternative; | | |
| | | | not shown), A257C | | |
| | | | (alternative; not shown), | | |
| | | | A257V (alternative; not | | |
| | | | shown), A2621, A262C | | |
| | | | (alternative; not shown), | | |
| | | | A262W (alternative; not | | |
| | | | shown), A262V (alternative; | | |
| | | | not shown), G263S, | | |
| | | | F266L, L2701, L270T | | |
| | | | (alternative; not shown), | | |
| | | | L270S (alternative; not | | |
| | | | shown), L270M (alternative; | | |
| | | | not shown), L270N | | |
| | | | (alternative; not shown), | | |
| | | | K276T, E277S, V278L, 1281P, | | |
| | | | A285L, D286K, L288V, Y291V, | | |
| | | | Y291D (alternative; not | | |
| | | | shown), M292F, Y295L, | | |
| | | | R308L, R308P (alternative; | | |
| | | | not shown), T314A, 1334K, | | |
| | | | G340A, S357W, V360N, L362A, | | |
| | | | A367E, M377L, M377H | | |
| | | | (alternative; not shown), | | |
| | | | D388Y, G402P, N403H, N403K | | |
| | | | (alternative; not shown), | | |
| | | | N403W (alternative; not | | |
| | | | shown), N403V (alternative; | | |
| | | | not shown), H405F, A408M, | | |
| | | | N413H | | |
| coenzyme A | 1 | MNKDTLIPTT KDLKLKTNVE | D12L, L15P, F34K, N42D, | 1 | MNKDTLIPTT KLLKPKTNVE |
| acylating | | NINLKNYKDN SSCFGVFENV | 144L, A47T, A47V | | NINLKNYKDN SSCKGVFENV |
| aldehyde | | ENAINSAVHA QKILSLHYTK | (alternative; not shown), | | EDALNSTVHA RKILSGACGK |
| dehydrogenase | 61 | EQREKIITEI RKAALENKEV | Q51R, Q51K (alternative; | 61 | EQREKFSTEI AKAALENKEV |
| [Clostridium | | LATMILEETH MGRYEDKILK | not shown), L56G, H57A, | | LATMILEETH RGRYEDKILK |
| beijerinckii] | | HELVAKYTPG TEDLTTTAWS | Y58C, Y58L (alternative; | | HELRATVTPG TENLTTTAWS |
| Sequence ID: | 121 | GDNGLTVVEM SPYGVIGAIT | not shown), Y58H | 121 | GDNGLTINAM WAMGPAGAST |
| gb\|AAD31841.1\| | | PSTNPTETVI CNSIGMIAAG | (alternative; not shown), | | PLTNPTETVI CNSIGCIVGG |
| AF132754_1 | | NAVVFNGHPG AKKCVAFAIE | Y58L (alternative; not | | NAVAFNPHPG AGKCVAYGIE |
| | 181 | MINKAIISCG GPENLVTTIK | shown), T59G, 166F, 1675, | 181 | MINMAIKGCG GPLNLVTTIM |
| | | NPTMESLDAI IKHPLIKLLC | 167A (alternative; not | | NPTLESLAAI CKHPMIQLLC |
| | | GTGGPGMVKT LLNSGKKAIG | shown), R71A, M91R, V104R, | | GTGGPRLVAV ILQGGKKAIG |
| | 241 | AGAGNPPVIV DDTADIEKAG | K106T, Y107V, D113N, | 241 | SSRGNPPTIV DSFADIERTG |
| | | KSIIEGCSFD NNLPCIAEKE | V1271, V128N, E129A, | | KSIIISCSLD NNIPCIAETS |
| | | VFVFENVADD LISNMLKNNA | E129G (alternative; | | LFVPENVLKD VISVFLKLNA |
| | 301 | VIINEDQVSK LIDLVLQKNN | not shown), E129A | 301 | VIINEDQVSL LIDLVLAKNN |
| | | ETQEYFINKK WVGKDAKLFS | (alternative; not shown), | | ETQEYFKNKK WVAKDAKLFS |
| | | DEIDVESPSN IKCIVCEVNA | E129Y (alternative; not | | DEIDVESPWN IKCVACEVNE |
| | 361 | NHPFVMTELM MPILPIVRVK | shown), E1291 (alternative; | 361 | NHPFVMTELL MPILPIVRVK |
| | | DIDEAVKYTK IAEQNRKHSA | not shown), S131W, P132A, | | DIYEAVKYTK IAERPHKFSA |
| | | YIYSKNIDNL NRFEREIDTT | Y133M, Y133V (alternative; | | MIYSKHIDNL WRFERGADST |
| | 421 | IFVKNAKSFA GVGYEAEGFT | not shown), V135P, 1136A | 421 | IFVKNGLSLA GVGYEAPGFT |
| | | TFTIAGSTGE GITSARNFTR | 11395, 1139T (alternative; | | SFTIAVPTGE GMTSAANFTR |
| | | QRRCVLAG | not shown), S142L, M156C, | | QRRTVNAN |
| | | (SEQ ID NO: 239) | A158V, A159G, V164A, | | (SEQ ID NO: 246) |
| | | | G167P, K172G, F177Y, | | |
| | | | A178G, K184M, 1187K, | | |
| | | | S188G, E193L, K200M, | | |
| | | | M204L, M204R (alternative; | | |
| | | | not shown), D208A, D208L | | |
| | | | (alternative; not shown), | | |
| | | | 1211C, L215M, S215A | | |
| | | | (alternative; not shown), | | |
| | | | K217Q, G226R, M227L, M2271 | | |
| | | | (alternative; not shown), | | |
| | | | K229A, T230V, T230R | | |
| | | | (alternative; not shown), | | |
| | | | T230Q (alternative; not | | |
| | | | shown), T230V (alternative; | | |
| | | | not shown), L2311, | | |
| | | | N233Q, N233V (alternative; | | |
| | | | not shown), S234G, | | |
| | | | A241S, G242S, G242D | | |
| | | | (alternative; not shown), | | |
| | | | A243R, A243N (alternative; | | |
| | | | not shown), A243E | | |
| | | | (alternative; not shown), | | |
| | | | V248T, D252S, T253F, | | |
| | | | T253L (alternative; not | | |
| | | | shown), T253V (alternative; | | |
| | | | not shown), T253L | | |
| | | | (alternative; not shown), | | |
| | | | T253A (alternative; not | | |
| | | | shown), K258R, A259T, G260S, | | |
| | | | G260T (alternative; not | | |
| | | | shown), G260C (alternative; | | |
| | | | not shown), G260V | | |
| | | | (alternative; not shown), | | |
| | | | E2651, E265C (alternative; | | |
| | | | not shown), E265W | | |
| | | | (alternative; not shown), | | |
| | | | E265V (alternative; not | | |
| | | | shown), G266S, F269L, | | |
| | | | L2731, L273T (alternative; | | |
| | | | not shown), L273S | | |
| | | | (alternative; not shown), | | |
| | | | L273M (alternative; not | | |
| | | | shown), L273N (alternative; | | |
| | | | not shown), K279T, E280S, | | |
| | | | V281L, F284P, A288L, D289K, | | |
| | | | L291V, N294V, N294D | | |
| | | | (alternative; not shown), | | |
| | | | M295F, N298L, K310L, K310P | | |
| | | | (alternative; not shown), | | |
| | | | Q317A, Q317T (alternative; | | |
| | | | not shown), 1327K, G333A, | | |
| | | | S349W, C353N, V355A, A360E, | | |
| | | | M370L, M370H (alternative; | | |
| | | | not shown), D383Y, N395P, | | |
| | | | R396H, R396K (alternative; | | |
| | | | not shown), R396W | | |
| | | | (alternative; not shown), | | |
| | | | R396V (alternative; not | | |
| | | | shown), H398F, Y401M, N406H | | |
| Aldehyde | 1 | MNMTEKDIEK IVQSVLHNVE | I133R, A146R, L148T, K149V, | 1 | MNMTEKDIEK IVQSVLHNVE |
| Dehydrogenase | | SALGKSASAS PSVSAVSVAS | D155N, V170N, E171A, E171G | | SALGKSASAS PSVSAVSVAS |
| [Caldalkali- | | GEGIKPVQFK QVPVFQQETV | (alternative; not shown), | | GEGIKPVQFK QVPVFQQETV |
| bacillus | 61 | KSPNRNRNLG GAEEKWGVFN | E171Y (alternative; not | 61 | KSPNRNRNLG GAEEKWGVFN |
| thermarum | | HMEDAIEASY RAQMEFVKHF | shown), E1711 (alternative; | | HMEDAIEASY RAQMEFVKHF |
| TA2.A1] | | QLKDREKIIT AIREAVLREK | not shown), A173W, P174A, | | QLKDREKIIT AIREAVLREK |
| Wild-Type | 121 | EVLARKVYEE TKIGRYEDKV | Y175M, Y175V (alternative; | 121 | EVLARKVYEE TKRGRYEDKV |
| ref\|ZP_08533507.1\| | | AKHELAALKT PGTEDLKTEA | not shown), L177P, 1178A, | | AKHELRATVT PGTENLKTEA |
| Length: 527 | | FSGDNGLTIV ERAPYGLIGA | V181S, V181T (alternative; | | FSGDNGLTIN ARWAMGPAGA |
| | 181 | VTPVTNPTET IINNAIGMLA | not shown), V184L, M198C, | 181 | STPLTNPTET IINNAIGCLV |
| | | AGNAVVFNVH PSSKRSCAYA | A200V, A201G, V206A, V209P, | | GGNAVAFNPH PSSGRSCAYG |
| | | VQLINKAITE AGGPHHLVTM | K214G, F219Y, A220G, K226M, | | VQLINMAIKG AGGPLHLVTM |
| | 241 | VKEPTLDTLQ TLIDSPKVKL | T229K, E230G, H235L, K242M, | 241 | VMEPTRDTLA TLCDSPMVQL |
| | | LVGTGGPGLV QTLLKSGKKA | L246R, Q250A, Q250L | | LVGTGGPRIV AVILQGGKKA |
| | | IGAGAGNPPV IVDDTADLEH | (alternative; not shown), | | IGSSRGNPPT IVDSFADLER |
| | 301 | AARSIIEGAA FDNNLLCIAE | 1253C, K257M, K257A | 301 | TSRSIISGAA LDNNILCIAE |
| | | KEVFVLESVA DDLIFHMLNH | (alternative; not shown), | | TSLFVPESVL KDVIFVFLNL |
| | | GAYMLGQHEV EQVMAFALEE | K259Q, G268R, L2691, Q271A, | | GAYMLGQHEV ELVMAFALAE |
| | 361 | QGNEQNRGCG FNPQRHYQVS | T272V, T272R (alternative; | 361 | QGNEQNRGCG FNPQRHYQKS |
| | | KDWIGQDARL FLEHIGVQPP | not shown), T272Q | | KDWIAQDARL FLEHIGVQPP |
| | | TEVKLLICDV EFDHPFVQLE | (alternative; not shown), | | WEVKLNICDV EEDHPFVQLE |
| | 421 | QMMPVLPIVR VKTLDEAIEK | T272V (alternative; not | 421 | QMMPVLPIVR VKTLDEAIEK |
| | | AVMAEHGNRH TAIMHSKNVD | shown), L2731, K275Q, | | AVMAEHGNRH TAIMHSKNVD |
| | | HLTKFARAIQ TTLFVKNASS | K275V (alternative; not | | HLTKFARAIQ TTLFVKNASS |
| | 481 | LAGVGYGGEG HTTMTIAGPT | shown), S276G, A283S, | 481 | LAGVGYGGEG HTTMTIAGPT |
| | | GEGVTSAKTF TRERRCVLAE | G284S, G284D (alternative; | | GEGVTSAKTF TRERRCVLAE |
| | | GGFRIIG | not shown), A285R, A285N | | GGFRIIG |
| | | (SEQ ID NO: 240) | (alternative; not shown), | | (SEQ ID NO:247) |
| | | | A285E (alternative; not | | |
| | | | shown), V290T, D294S, | | |
| | | | T295F, T295L (alternative; | | |
| | | | not shown), T295V | | |
| | | | (alternative; not shown), | | |
| | | | T295A (alternative; not | | |
| | | | shown), H300R, A301T, A3025, | | |
| | | | A302T (alternative; not | | |
| | | | shown), A302C (alternative; | | |
| | | | not shown), A302V | | |
| | | | (alternative; not shown), | | |
| | | | E3071, E307C (alternative; | | |
| | | | not shown), E307W | | |
| | | | (alternative; not shown), | | |
| | | | E307V (alternative; not | | |
| | | | shown), G3085, F311L, L3151, | | |
| | | | L315T (alternative; not | | |
| | | | shown), L315S (alternative; | | |
| | | | not shown), L315M | | |
| | | | (alternative; not shown), | | |
| | | | L315N (alternative; not | | |
| | | | shown), K321T, E322S, V323L, | | |
| | | | L326P, A330L, D331K, L333V, | | |
| | | | H336V, H336D (alternative; | | |
| | | | not shown), M337F, H340L, | | |
| | | | Q352L, Q352P (alternative; | | |
| | | | not shown), E359A, E359T | | |
| | | | (alternative; not shown), | | |
| | | | V379K, G385A, T401W, L405N, | | |
| | | | 1407A, F412E | | |

[0841] Exemplary ALD variants include, but are not limited to, single substitutions, or a combination of one or more of the substitutions, at 12L, 15P, 34K, 42D, 44L, 47T, 51R, 51R, 51K, 56(57A, 58C, 58L, 58H, 58L, 59G, 66F, 67S, 67A, 71A, 91R, 104R, 106T, 107V, 127I, 128N, 129A, 129G, 129Y, 129I, 131W, 132A, 133M, 133V, 133M, 135P, 136A, 139S, 139T, 142L, 156C, 158V, 159G, 164A, 167P, 172G, 178G, 184M, 187K, 188G, 200M, 204L, 204R, 208A, 208L, 211C, 215M, 215A, 217Q, 226R, 227L, 227I, 229A, 230V, 230R, 230R, 230Q, 230V, 231I, 233Q, 233V, 234G, 241S, 242S, 242D, 243R, 243N, 243E, 248T, 252S, 253F, 253L, 253V, 253L, 253A, 258R, 259T, 260S, 260T, 260C, 265I, 265C, 265W, 265V, 266S, 269L, 273I, 273T, 273S, 273M, 273T, 273N, 279T, 280S, 281L, 284P, 288L, 289K, 291V, 294V, 295F, 298L, 310L, 310P, 317A, 317T, 327K, 333A, 349W, 360E, 370L, 370H, 395P, 396H, 396K, 396W, 396V, 398F, 401M, 406H, 411W, 416G, 416S, 417A, 419S, 426G, 427L, 427F, 427V, 427L, 429L, 429M, 437P, 439H, 441S, 446V, 446I, 447P, 456A, 464T, 464S, 466N, 468N for representative sequence(s) shown in Table 58; 12L, 15P, 34K 42D, 44L, 47T, 47V, 51R, 51R, 51K, 56G, 57A, 58C, 58L, 58H, 59G, 66F, 67S, 67A, 71A, 91R, 104R, 106T, 107V, 113N, 127I, 128N, 129A, 129G, 129Y, 129I, 131W, 132A, 133M, 133V, 133M, 135P, 136A, 139S, 139T, 142L, 156C, 158V, 159G, 164A, 167P, 172G, 177Y, 178G, 184M, 187K, 188G, 193L, 200M, 204L, 204R, 208A, 208L, 211C, 215M, 215A, 217Q, 226R, 227L, 227I, 229A, 230V, 230R, 230R, 230Q, 230V, 231I, 233Q, 233V, 234G, 234G, 241S, 242S, 242D, 243R, 243N, 243E, 248T, 252S, 253F, 253L, 253V, 253A, 258R, 259T, 260S, 260T, 260C, 260V, 265I, 265C, 265W, 265V, 266S, 269L, 273I, 273T 273S 273M 273T 273N 279T 280S 281L 284P 288L 289K 291V 294V 294D 295F 298L 310L 310P 317A 317T 327K 333A 349W 353N 355A 360E 370L 370H 383Y 395P 396H 396K 396W 396V 398F 401M 406H for representative sequences) shown in Table 58; D13L, I16P, L32K, N40D, 142L, A45T, A45V, Q49R, Q49R, Q49K, L54G, Y55A, Y56C, Y56L, Y56H, Y56L, T57G, I64F, I65S, I65A, R69A, M89R, V102R, K104T, Y105V, D111N, V1251, V126N, E127A, E127G, E127A, E127Y, E127I, S129W, P130A, Y131M, Y131V, Y131M, V133P, I134A, I137S, I137T, S140L, M154C, A156V, A156V, A157G, V162A, G165P, K170Q F175Y, A176G, K182M, I185K, S186G, E191L, K198M, M202L, M202R, N206A, N206L, M209C, Y213M, Y213A, K215Q, G224R, L225I, K227A, T228V, T228R, T228R, T228Q, T228V, L229I, N231Q, N231V, S232G, S232G, A239S, A239S, G240S, G240D, A241R, A241N, A241E, V246T, D250S, T251F, T251L, T251V, T251L, T251A, K256R, A257T, G258S, G258T, G260C, G260V, E263I, E263C, E263W, E263V, G264S, G264S, F267L, L271I, L271T, L271S, L271M, L271T, L271N, K277T, E278S, V279L, F282P, A286L, D287K, L289V, N292V, N292D, M293F, N296L, K308L, K308P, E316A, E316T, I326K, G332A, D348W, C352N, I354A, A359E, M369L, M369H, D382Y, R394P, K395H, K395K, K395W, K395V, H397F, Y400M, N405H for representative sequence(s) shown in Table 58; I133R, A146R, L148T, K149V, D155N, V170N, E171A, E171G, E171A, E171Y, E171I, A173W, P174A, Y175M, Y175V, Y175M, L177P, I178A, V181S, V181T, V184L, M198C, A200V, A201G, V206A, V209P, K214G, F219Y, A220G, K226M, T229K, E230G, H235L, K242M, L246R, Q250A, Q250L, I253C, K257M, K257A, K259Q, G268R, L269I, Q271A, T272V, T272R, T272R, T272Q, T272V, L273I, K275Q, K275V, S276G, S276G, A283S, A283S, G284S, G284D, A285R, A285N, A285E, V290T, D294S, T295F, T295L, T295V, T295A, H300R, A301T, A302S, A302T, A302C, A302V, E307I, E307C, E307W, E307V, G308S, G308S, F311L, L315I, L315T, L315S, L315M, L315T, L315N, K321T, E322S, V323L, L326P, A330L, D331K, L333V, H336V, H336D, M337F, H340L, Q352L, Q352P, E359A, E359T, V379K, G385A, T401 W, L405N, 1407A, F412E for representative sequence(s) shown in Table 58; E40D, V42L, A45T, A45V, Y49R, Y49R, Y49K, T54G, L55C, L55H, L55L, S56G, L63F, I64S, I64A, R68A, M88R, A101R, L103T, K104V, D110N, L1241, I125N, E126A, E126G, E126Y, E126I, G128W, P129A, Y130M, Y130V, Y130M, V132P, I133A, I136S, I136T, T139L, M153C, A155V, A156G, V160A, K169G, K174Y, I175G, Q181M, V184K, K185G, N190L, A197M, I201L, I201R, N205A, N205L, M208C, G212M, G212A, N214Q, G223R, V224L, V2241, K226A, A227V, A227R, A227R, A227Q, A227V, V2281, S230Q, S230V, S231G, S231G, A238S, A238S, G239S, G239D, A240R, A240N, A240E, V245T, D248S, T250F, T250L, T250V, T250A, K255R, A256T, A257S, A257T, A257C, A257V, A262I, A262C, A262W, A262V, G263S, F266L, L270I, L270T, L270S, L270M, L270T, L270N, K276T, E277S, V278L, I281P, A285L, D286K, L288V, Y291V, Y291D, M292F, Y295L, R308L, R308P, T314A, I334K, G340A, S357W, V360N, L362A, A367E, M377L, M377H, D388Y, G402P, N403H, N403K, N403W, N403V, H405F, A408M for representative sequence(s) shown in Table 58.

[0842] Representative combinations include combinations of the single substitutions exemplified in Table 58 as in the corresponding respective sequences, including but not limited to: 12A; 12V; 139S; 139T; 204R; 361S; 396H; 417A; 129Y, 129I, 131W, 132A, 133M, 215M, 217Q, 226R, 230V, 259T; 132A, 133M, 133V, 136A, 139S, 142L, 156C, 158V, 159G, 164A, 167P, 187K, 188G, 200M; 241S, 242D, 243N, 248T, 252S, 253F, 258R, 259T; 396H, 396W; 142L, 156C; 129I, 131W; 394R, 411Y; 291V, 295F, 310L; 294V, 298L, 310L; 129A, 131W, 132A, 133M; 56G, 426G; 208L, 456A; 30N, 260V; 129I, 447P; 233Q, 291V, 466N; 355A, 479R; 273T, 439H, 468N; 117T, 446V; 12L, 310L, 446I, 464S; 139S, 204R, 241S, 396H, 417A; 253V, 437P; 58L, 269L, 298L; 139S, 204R; 67S, 231I, 273S, 447P; 129A, 427L; 139S, 204R, 417A; 91R, 184M, 427L, 464T; 253F, 427V; 333A, 429L; 139T, 204R, 241S, 396H, 417A; 67A, 217Q; 129I, 280S, 429M; 12A, 139S, 204R, 396H; 295F, 298L, 310L, 310P, 327K, 353N; 211C, 242D, 427V; 164A, 427L, 456A, 466N; 12V, 139S, 204R, 396H; 139S, 204R, 396H; 12V, 139S, 204R, 361S, 396H; 66F, 241S, 273T, 310P, 406H, 446V, 464T; 294D, 383Y; 135P, 211C, 396H, 401M; 281L, 396H, 401M; 204R, 281L, 396H, 401M; 204R, 211C, 396H, 401M; 204R, 396H, 401M; 129I, 135P, 204R, 396H; 129I, 135P, 211C; 129I, 135P, 211C, 396H; 129I, 135P, 396H; 129I, 135P, 281L, 396H; 211C, 281L, 396H, 401M; 211C, 281L, 401M; 211C, 401M; 204R, 211C, 370L, 396H; 204R, 211C, 281L, 396H, 401M; 204R, 211C, 281L, 401M; 204R, 211C, 401M; 204R, 281L, 401M; 135P, 204R, 211C, 401M; 129I, 135P, 211C, 396H, 401M; 129I, 135P, 204R, 211C; 129I, 135P, 204R, 211C, 396H; 204R, 401M; 129I, 135P, 204R, 396H, 437P; 12A, 139S, 204R, 361S, 396H; 15P, 129G, 167P, 227I, 258R, 260T, 298L, 406H, 446I; 124R, 139S, 204R, 396H, 413S; 67S, 129A, 215A, 419S; 353N, 452M; 58L, 217Q, 242D, 273N; 34K, 437P; 139S, 204R, 396H, 417A; 294V, 327K; 59G, 259T, 280S, 333A; 167P, 401M; 139T, 204R, 417A; 164A, 398F, 411W; 47V, 177Y; 172G, 360E; 158V, 317T; 57A, 273N, 360E; 113N, 193L; 215A, 416S, 446I; 132A, 178G, 310L, 370H; 172G, 327K, 464T; 294V, 295F, 327K; 44L, 446I; 204R, 396H, 417A; 12L, 187K, 317T, 441S; 158V, 441S; 215M, 327K, 406H, 464T, and the like. It is readily apparent that these an other combinations can be readily made, used and screened using methods well known in the art and as disclosed herein. Based on methods well known in the art for aligning homologous sequences, as described herein, the corresponding positions for the indicated variant amino acid positions of Table 58 can be readily determined for a homologous ALD sequence.

[0843] As disclosed herein, it is well known to those skilled in the art that different organisms can exhibit codon bias that can affect expression of a gene. Therefore, any of the variants described herein can optionally be codon optimized for the desired amino acid at a particular position, as discussed above. Table 59 shows the well known genetic code, and one skilled in the art can readily incorporate alternative codons, where desired, into a variant to optimize expression and production, including increased expression and production, of a a desired product in a variant host strain.

TABLE 59
Genetic code for translation
from nucleotide sequence to
amino acid sequence.

| First | Second base | | | | Third |
|---|---|---|---|---|---|
| base | U | C | A | G | base |
| U | Phe | Ser | Tyr | Cys | U |
| | Phe | Ser | Tyr | Cys | C |
| | Leu | Ser | End | End | A |
| | Leu | Ser | End | Trp | G |
| C | Leu | Pro | His | Arg | U |
| | Leu | Pro | His | Arg | C |
| | Leu | Pro | Gln | Arg | A |
| | Leu | Pro | Gln | Arg | G |
| A | Ile | Thr | Asn | Ser | U |
| | Ile | Thr | Asn | Ser | C |
| | Ile | Thr | Lys | Arg | A |
| | Met | Thr | Lys | Arg | G |
| G | Val | Ala | Asp | Gly | U |
| | Val | Ala | Asp | Gly | C |
| | Val | Ala | Glu | Gly | A |
| | Val | Ala | Glu | Gly | G |

[0844] In addition, as additionally described herein, one skilled in the art can readily incorporate amino acid substitutions, in particular conservative amino acid substitutions, to generate additional enzyme variants, which can be screened for desired activities and/or properties using the methods disclosed herein and/or well known in the art. Further, alignments of related sequences, such as those exemplified in Tables 53-58, can be used to guide the identification of additional amino acid positions to either vary or maintain as an invariant position using routine methods well known to those skilled in the art.

[0845] Throughout this application various publications have been referenced. The disclosures of these publications in their entireties, including GenBank and GI number publications, are hereby incorporated by reference in this application in order to more fully describe the state of the art to which this invention pertains. Although the invention has been described with reference to the examples provided above, it should be understood that various modifications can be made without departing from the spirit of the invention.

1. An isolated nucleic acid molecule selected from:
(a) a nucleic acid molecule encoding an amino acid sequence referenced in Tables 53, 55 or 57, wherein said amino acid sequence comprises one or more variant amino acid positions set forth in Tables 54, 56 or 58 or Example XXXXIII;
(b) a nucleic acid molecule that hybridizes to the nucleic acid of (a) under highly stringent hybridization conditions and comprises a nucleic acid sequence that encodes one or more variant amino acid positions set forth in Tables 54, 56 or 58 or Example XXXXIII; and
(c) a nucleic acid molecule that is complementary to (a) or (b);
with the proviso that the encoded amino acid sequence is not the wild type parental sequence or a naturally occurring amino acid sequence.

2. The isolated nucleic acid molecule of claim 1, wherein said amino acid sequence has at least 65%, 70%, 75%, 80%, 85%, 90%, 95%, 98% or 99% sequence identity, or is identical, to the amino acid sequence referenced in Table 53, 55 or 57.

3. The isolated nucleic acid molecule of claim 1, wherein said amino acid sequence comprises at least two, three, four, five, six, seven, eight, nine, ten, eleven, twelve, thirteen, fourteen, fifteen, sixteen, seventeen, eighteen, nineteen, twenty or more variants set forth in Tables 54, 56 or 58 or Example XXXXIII.

4. A vector containing the nucleic acid molecule of claim 1.

5. (canceled)

6. A host cell comprising the vector of claim 4.

7-9. (canceled)

10. The host cell of claim 6, wherein said host cell is a non-naturally occurring microbial organism having a pathway that produces 4-HB, GBL, 4-HBal, 4-HBCoA, BDO and/or putrescine.

11-12. (canceled)

13. Culture medium comprising the host cell of claim 6.

14. An isolated polypeptide comprising an amino acid sequence referenced in Tables 53, 55 or 57, wherein said amino acid sequence comprises one or more variant amino acid positions set forth in Tables 54, 56 or 58 or Example XXXXIII.

15-19. (canceled)

20. A host cell expressing the polypeptide of claim 14.

21. (canceled)

22. A composition comprising the polypeptide of claim 14 and at least one substrate for said polypeptide.

23-24. (canceled)

25. A method for producing 4-hydroxybutyrate (4-HB), gamma-butyrolactone (GBL), 4-hydroxybutyraldehyde (4-HBal), 4-hydroxybutyryl-CoA (4-HBCoA), 1,4-butanediol (BDO) and/or putrescine comprising culturing said host cell of claim 6 under conditions and for a sufficient period of time to produce 4-HB, GBL, 4-HBal, 4-HBCoA, BDO and/or putrescine.

26. A method for producing 4-HB, GBL, 4-HBal, 4-HBCoA, BDO and/or putrescine, comprising culturing a non-naturally occurring microbial organism having a pathway that produces 4-HB, GBL, 4-HBal, 4-HBCoA, BDO and/or putrescine under conditions and for a sufficient period of time to produce 4-HB, GBL, 4-HBal, 4-HBCoA, BDO and/or putrescine, wherein said microbial organism comprises a nucleic acid of claim 1.

27. (canceled)

28. A non-naturally occurring microbial organism, said microbial organism having a 4-hydroxybutyrate pathway and being capable of producing 4-hydroxybutyrate, wherein said microbial organism comprises a genetic modification, said genetic modification selected from:
(A) a genetic modification that increases expression of acetate kinase and phosphotransacetylase;
(B) a genetic modification that inactivates expression of an aerobic respiratory control regulatory system;
(C) a genetic modification that truncates a glucose phosphotransferase system (PTS) permease;
(D) a genetic modification that increases expression of phosphoenolpyruvate carboxylase;
(E) a genetic modification that increases expression of alpha-ketoglutarate dehydrogenase;
(F) a genetic modification that increases expression of a non-phosphotransferase (PTS) glucose uptake system;
(G) a genetic modification that increases expression of a gamma-butyrolactone esterase;
(H) a genetic modification that decreases expression of succinyl-CoA synthetase;
(I) a genetic modification that decreases expression of an acyl coenzyme A thioesterase;
(J) a genetic modification that decreases expression of an alcohol dehydrogenase;
(K) a genetic modification that decreases expression of a non-energy-producing NADH dehydrogenase;
(L) a genetic modification that decreases expression of a cytochrome oxidase; and
(M) a combination of two or more, three or more, four or more, five or more, six or more, seven or more, eight or more, nine or more, ten or more, eleven or more, or all of the genetic modifications of parts (A)-(L).

29-34. (canceled)

35. A method for producing 4-hydroxybutyrate, comprising culturing the non-naturally occurring microbial organism of claim 28 under conditions and for a sufficient period of time to produce 4-hydroxybutyrate.

36. A method for producing 1,4-butanediol, comprising culturing the non-naturally occurring microbial organism of claim 28 under conditions and for a sufficient period of time to produce 1,4-butanediol.

37-38. (canceled)

39. A method for producing isolated or purified 4-hydroxybutyrate or 1,4-butanediol, comprising culturing the non-naturally occurring microbial organism of claim 28 under conditions and for a sufficient period of time to produce 4-hydroxybutyrate or 1,4-butanediol, and isolating or purifying the 4-hydroxybutyrate or 1,4-butanediol.

40. (canceled)

41. Culture medium comprising bioderived 4-HB, GBL, 4-HBal, 4-HBCoA, BDO and/or putrescine, wherein said bioderived 4-HB, GBL, 4-HBal, 4-HBCoA, BDO and/or putrescine has a carbon-12, carbon-13 and carbon-14 isotope ratio that reflects an atmospheric carbon dioxide uptake source, and wherein the bioderived 4-HB, GBL, 4-HBal, 4-HBCoA, BDO and/or putrescine is produced by the host cell of claim 6.

42. (canceled)

43. Bioderived 4-HB, GBL, 4-HBal, 4-HBCoA, BDO and/or putrescine having a carbon-12, carbon-13 and carbon-14 isotope ratio that reflects an atmospheric carbon dioxide uptake source, and wherein the bioderived 4-HB, GBL, 4-HBal, 4-HBCoA, BDO and/or putrescine is produced by the host cell of claim 6.

44. (canceled)

45. A bioderived 4-HB, GBL, 4-HBal, 4-HBCoA, BDO and/or putrescine produced according to the method of claim 35.

46-48. (canceled)

49. A biobased product comprising said bioderived 4-HB, GBL, 4-HBal, 4-HBCoA, BDO and/or putrescine of claim 43, wherein said biobased product is a plastic, elastic fiber, polyurethane, polyester, polyhydroxyalkanoate, poly-4-hydroxybutyrate (P4HB), or a co-polymer thereof, poly(tetramethylene ether) glycol (PTMEG), polybutylene terephthalate (PBT), polyurethane-polyurea copolymer, or nylon.

50-51. (canceled)

52. A molded product obtained by molding a biobased product of claim 49.

53. A process for producing a biobased product of claim 49, comprising chemically reacting said bioderived 4-HB, GBL, 4-HBal, 4-HBCoA, BDO and/or putrescine with itself or another compound in a reaction that produces said biobased product.

54-56. (canceled)

The application's sequence listing, which the Patent Office published only in electronic form, follows.

SEQUENCE LISTING (518 sequences)

SEQ ID NO: 1 - DNA, 59 bp, Artificial Sequence
  Description of Artificial Sequence: Synthetic primer
gacgaattcgctagcaagaggagaagtcgacatgtccaattcactggccgtcgttttac

SEQ ID NO: 2 - DNA, 47 bp, Artificial Sequence
  Description of Artificial Sequence: Synthetic primer
gaccctaggaagctttctagagtcgacctatgcggcatcagagcaga

SEQ ID NO: 3 - DNA, 18 bp, Artificial Sequence
  Description of Artificial Sequence: Synthetic primer
atgtaccgcaagttccgc

SEQ ID NO: 4 - DNA, 18 bp, Artificial Sequence
  Description of Artificial Sequence: Synthetic primer
caatttgccgatgcccag

SEQ ID NO: 5 - DNA, 20 bp, Artificial Sequence
  Description of Artificial Sequence: Synthetic primer
gctgaccactgaagactttg

SEQ ID NO: 6 - DNA, 19 bp, Artificial Sequence
  Description of Artificial Sequence: Synthetic primer
gatcagggcttcggtgtag

SEQ ID NO: 7 - DNA, 27 bp, Artificial Sequence
  Description of Artificial Sequence: Synthetic primer
ttggtgcgggccaagcaggatctgctc

SEQ ID NO: 8 - DNA, 30 bp, Artificial Sequence
  Description of Artificial Sequence: Synthetic primer
tcagccgaacgcctcgtcgaggatctcctg

SEQ ID NO: 9 - DNA, 32 bp, Artificial Sequence
  Description of Artificial Sequence: Synthetic primer
tggccaacataagttcaccattcgggcaaaac

SEQ ID NO: 10 - DNA, 29 bp, Artificial Sequence
  Description of Artificial Sequence: Synthetic primer
tctcttcaaccagccattcgttttgcccg

SEQ ID NO: 11 - DNA, 27 bp, Clostridium acetobutylicum
attaaagttaagtggaggaatgttaac

SEQ ID NO: 12 - DNA, 22 bp, Artificial Sequence
  Description of Artificial Sequence: Synthetic primer
acacgcggatccaacgtcccgg

SEQ ID NO: 13 - DNA, 23 bp, Artificial Sequence
  Description of Artificial Sequence: Synthetic primer
agcggctccgctagccgcttatg

SEQ ID NO: 14 - DNA, 24 bp, Artificial Sequence
  Description of Artificial Sequence: Synthetic primer
aagccgttgctgcagctcttgagc

SEQ ID NO: 15 - DNA, 23 bp, Artificial Sequence
  Description of Artificial Sequence: Synthetic primer
atctccggcggtcggatccgtcg

SEQ ID NO: 16 - DNA, 20 bp, Artificial Sequence
  Description of Artificial Sequence: Synthetic primer
aaagcggctagccacgccgc

SEQ ID NO: 17 - DNA, 20 bp, Artificial Sequence
  Description of Artificial Sequence: Synthetic primer
attacacgaggtacccaacg

SEQ ID NO: 18 - DNA, 22 bp, Artificial Sequence
  Description of Artificial Sequence: Synthetic primer
atgctggcgtacaaaggtgtcc

SEQ ID NO: 19 - DNA, 22 bp, Artificial Sequence
  Description of Artificial Sequence: Synthetic primer
ggacacctttgtacgccagcat

SEQ ID NO: 20 - DNA, 25 bp, Artificial Sequence
  Description of Artificial Sequence: Synthetic primer
atcgcctacactaaaccagaagtgg

SEQ ID NO: 21 - DNA, 25 bp, Artificial Sequence
  Description of Artificial Sequence: Synthetic primer
ccacttctggtttagtgtaggcgat

SEQ ID NO: 22 - DNA, 20 bp, Artificial Sequence
  Description of Artificial Sequence: Synthetic primer
aggcagttccataggatggc

SEQ ID NO: 23 - DNA, 55 bp, Artificial Sequence
  Description of Artificial Sequence: Synthetic primer
tgacatgtaacacctaccttctgtgcctgtgccagtggttgctgtgatatagaag

SEQ ID NO: 24 - DNA, 48 bp, Artificial Sequence
  Description of Artificial Sequence: Synthetic primer
ataataatacatatgaaccatgcgagttacgggcctataagccaggcg

SEQ ID NO: 25 - DNA, 42 bp, Artificial Sequence
  Description of Artificial Sequence: Synthetic primer
agtttttcgatatctgcatcagacaccggcacattgaaacgg

SEQ ID NO: 26 - DNA, 60 bp, Artificial Sequence
  Description of Artificial Sequence: Synthetic primer
ctggcacaggcacagaaggtaggtgttacatgtcagaacgtttacacaatgacgtggatc

SEQ ID NO: 27 - DNA, 49 bp, Artificial Sequence
  Description of Artificial Sequence: Synthetic primer
agacaaatcggttgccgtttgttaagccaggcgagatatgatctatatc

SEQ ID NO: 28 - DNA, 54 bp, Artificial Sequence
  Description of Artificial Sequence: Synthetic primer
gagttttgatttcagtactcatcatgtaacacctaccttcttgctgtgatatag

SEQ ID NO: 29 - DNA, 54 bp, Artificial Sequence
  Description of Artificial Sequence: Synthetic primer
ctatatcacagcaagaaggtaggtgttacatgatgagtactgaaatcaaaactc

SEQ ID NO: 30 - DNA, 49 bp, Artificial Sequence
  Description of Artificial Sequence: Synthetic primer
gatatagatcatatctcgcctggcttaacaaacggcaaccgatttgtct

SEQ ID NO: 31 - DNA, 70 bp, Artificial Sequence
  Description of Artificial Sequence: Synthetic oligonucleotide
tattgtgcatacagatgaatttttatgcaaacagtcagccctgaagaagggtgtaggctggagctgcttc

SEQ ID NO: 32 - DNA, 70 bp, Artificial Sequence
  Description of Artificial Sequence: Synthetic oligonucleotide
caaaaaaccggagtctgtgctccggttttttattatccgctaatcaattacatatgaatatcctccttag

SEQ ID NO: 33 - DNA, 51 bp, Artificial Sequence
  Description of Artificial Sequence: Synthetic primer
ataataatagaattcgtttgctacctaaattgccaactaaatcgaaacagg

SEQ ID NO: 34 - DNA, 47 bp, Artificial Sequence
  Description of Artificial Sequence: Synthetic primer
tattattatggtaccaatatcatgcagcaaacggtgcaacattgccg

SEQ ID NO: 35 - DNA, 47 bp, Artificial Sequence
  Description of Artificial Sequence: Synthetic primer
tgatctggaagaattcatcggctttaccaccgtcaaaaaaaacggcg

SEQ ID NO: 36 - DNA, 48 bp, Artificial Sequence
  Description of Artificial Sequence: Synthetic primer
ataaaaccctgcagcggaaacgaagttttatccatttttggttacctg

SEQ ID NO: 37 - DNA, 35 bp, Artificial Sequence
  Description of Artificial Sequence: Synthetic primer
ggaagagaggctggtacccagaagccacagcagga

SEQ ID NO: 38 - DNA, 38 bp, Artificial Sequence
  Description of Artificial Sequence: Synthetic primer
gtaatcactgcgtaagcgccatgccccggcgttaattc

SEQ ID NO: 39 - DNA, 25 bp, Artificial Sequence
  Description of Artificial Sequence: Synthetic primer
attgccgcgttcctcctgctgtcga

SEQ ID NO: 40 - DNA, 24 bp, Artificial Sequence
  Description of Artificial Sequence: Synthetic primer
cgacagcaggaggaacgcggcaat

SEQ ID NO: 41 - DNA, 75 bp, Artificial Sequence
  Description of Artificial Sequence: Synthetic primer
gtttgcacgctatagctgaggttgttgtcttccagcaacgtaccgtatacaataggcgtatcacgaggccctttc

SEQ ID NO: 42 - DNA, 70 bp, Artificial Sequence
  Description of Artificial Sequence: Synthetic primer
gctacagcatgtcacacgatctcaacggtcggatgaccaatctggctggtatgggaattagccatggtcc

SEQ ID NO: 43 - DNA, 73 bp, Artificial Sequence
  Description of Artificial Sequence: Synthetic oligonucleotide
tgtgagtgaaagtcacctgccttaatatctcaaaactcatcttcgggtgacgaaatatggcgtgactcgatac

SEQ ID NO: 44 - DNA, 70 bp, Artificial Sequence
  Description of Artificial Sequence: Synthetic oligonucleotide
tctgtatcaggctgaaaatcttctctcatccgccaaaacagcttcggcgttaagatgcgcgctcaaggac

SEQ ID NO: 45 - protein, 20 aa, Euglena gracilis
MTYKAPVKDVKFLLDKVFKV

SEQ ID NO: 46 - DNA, 2036 bp, Escherichia coli
atgaacttacatgaatatcaggcaaaacaactttttgcccgctatggcttaccagcaccggtgggttatgcctgtactactccgcgcgaagcagaagaagccgcttcaaaaatcggtgccggtccgtgggtagtgaaatgtcaggttcacgctggtggccgcggtaaagcgggcggtgtgaaagttgtaaacagcaaagaagacatccgtgcttttgcagaaaactggctgggcaagcgtctggtaacgtatcaaacagatgccaatggccaaccggttaaccagattctggttgaagcagcgaccgatatcgctaaagagctgtatctcggtgccgttgttgaccgtagttcccgtcgtgtggtctttatggcctccaccgaaggcggcgtggaaatcgaaaaagtggcggaagaaactccgcacctgatccataaagttgcgcttgatccgctgactggcccgatgccgtatcagggacgcgagctggcgttcaaactgggtctggaaggtaaactggttcagcagttcaccaaaatcttcatgggcctggcgaccattttcctggagcgcgacctggcgttgatcgaaatcaacccgctggtcatcaccaaacagggcgatctgatttgcctcgacggcaaactgggcgctgacggcaacgcactgttccgccagcctgatctgcgcgaaatgcgtgaccagtcgcaggaagatccgcgtgaagcacaggctgcacagtgggaactgaactacgttgcgctggacggtaacatcggttgtatggttaacggcgcaggtctggcgatgggtacgatggacatcgttaaactgcacggcggcgaaccggctaacttccttgacgttggcggcggcgcaaccaaagaacgtgtaaccgaagcgttcaaaatcatcctctctgacgacaaagtgaaagccgttctggttaacatcttcggcggtatcgttcgttgcgacctgatcgctgacggtatcatcggcgcggtagcagaagtgggtgttaacgtaccggtcgtggtacgtctggaaggtaacaacgccgaactcggcgcgaagaaactggctgacagcggcctgaatattattgcagcaaaaggtctgacggatgcagctcagcaggttgttgccgcagtggaggggaaataatgtccattttaatcgataaaaacaccaaggttatctgccagggctttaccggtagccaggggactttccactcagaacaggccattgcatacggcactaaaatggttggcggcgtaaccccaggtaaaggcggcaccacccacctcggcctgccggtgttcaacaccgtgcgtgaagccgttgctgccactggcgctaccgcttctgttatctacgtaccagcaccgttctgcaaagactccattctggaagccatcgacgcaggcatcaaactgattatcaccatcactgaaggcatcccgacgctggatatgctgaccgtgaaagtgaagctggatgaagcaggcgttcgtatgatcggcccgaactgcccaggcgttatcactccgggtgaatgcaaaatcggtatccagcctggtcacattcacaaaccgggtaaagtgggtatcgtttcccgttccggtacactgacctatgaagcggttaaacagaccacggattacggtttcggtcagtcgacctgtgtcggtatcggcggtgacccgatcccgggctctaactttatcgacattctcgaaatgttcgaaaaagatccgcagaccgaagcgatcgtgatgatcggtgagatcggcggtagcgctgaagaagaagcagctgcgtacatcaaagagcacgttaccaagccagttgtgggttacatcgctggtgtgactgcgccgaaaggcaaacgtatgggccacgcgggtgccatcattgccggtgggaaagggactgcggatgagaaattcgctgctctggaagccgcaggcgtgaaaaccgttcgcagcctggcggatatcggtgaagcactgaaaactgttctgaaataa

SEQ ID NO: 47 - protein, 388 aa, Escherichia coli
MNLHEYQAKQLFARYGLPAPVGYACTTPREAEEAASKIGAGPWVVKCQVHAGGRGKAGGVKVVNSKEDIRAFAENWLGKRLVTYQTDANGQPVNQILVEAATDIAKELYLGAVVDRSSRRVVFMASTEGGVEIEKVAEETPHLIHKVALDPLTGPMPYQGRELAFKLGLEGKLVQQFTKIFMGLATIFLERDLALIEINPLVITKQGDLICLDGKLGADGNALFRQPDLREMRDQSQEDPREAQAAQWELNYVALDGNIGCMVNGAGLAMGTMDIVKLHGGEPANFLDVGGGATKERVTEAFKIILSDDKVKAVLVNIFGGIVRCDLIADGIIGAVAEVGVNVPVVVRLEGNNAELGAKKLADSGLNIIAAKGLTDAAQQVVAAVEGK

SEQ ID NO: 48 - protein, 289 aa, Escherichia coli
MSILIDKNTKVICQGFTGSQGTFHSEQAIAYGTKMVGGVTPGKGGTTHLGLPVFNTVREAVAATGATASVIYVPAPFCKDSILEAIDAGIKLIITITEGIPTLDMLTVKVKLDEAGVRMIGPNCPGVITPGECKIGIQPGHIHKPGKVGIVSRSGTLTYEAVKQTTDYGFGQSTCVGIGGDPIPGSNFIDILEMFEKDPQTEAIVMIGEIGGSAEEEAAAYIKEHVTKPVVGYIAGVTAPKGKRMGHAGAIIAGGKGTADEKFAALEAAGVKTVRSLADIGEALKTVLK

SEQ ID NO: 49 - DNA, 3696 bp, Mycobacterium bovis
atggccaacataagttcaccattcgggcaaaacgaatggctggttgaagagatgtaccgcaagttccgcgacgacccctcctcggtcgatcccagctggcacgagttcctggttgactacagccccgaacccacctcccaaccagctgccgaaccaacccgggttacctcgccactcgttgccgagcgggccgctgcggccgccccgcaggcaccccccaagccggccgacaccgcggccgcgggcaacggcgtggtcgccgcactggccgccaaaactgccgttcccccgccagccgaaggtgacgaggtagcggtgctgcgcggcgccgccgcggccgtcgtcaagaacatgtccgcgtcgttggaggtgccgacggcgaccagcgtccgggcggtcccggccaagctactgatcgacaaccggatcgtcatcaacaaccagttgaagcggacccgcggcggcaagatctcgttcacgcatttgctgggctacgccctggtgcaggcggtgaagaaattcccgaacatgaaccggcactacaccgaagtcgacggcaagcccaccgcggtcacgccggcgcacaccaatctcggcctggcgatcgacctgcaaggcaaggacgggaagcgttccctggtggtggccggcatcaagcggtgcgagaccatgcgattcgcgcagttcgtcacggcctacgaagacatcgtacgccgggcccgcgacggcaagctgaccactgaagactttgccggcgtgacgatttcgctgaccaatcccggaaccatcggcaccgtgcattcggtgccgcggctgatgcccggccagggcgccatcatcggcgtgggcgccatggaataccccgccgagtttcaaggcgccagcgaggaacgcatcgccgagctgggcatcggcaaattgatcactttgacctccacctacgaccaccgcatcatccagggcgcggaatcgggcgacttcctgcgcaccatccacgagttgctgctctcggatggcttctgggacgaggtcttccgcgaactgagcatcccatatctgccggtgcgctggagcaccgacaaccccgactcgatcgtcgacaagaacgctcgcgtcatgaacttgatcgcggcctaccgcaaccgcggccatctgatggccgataccgacccgctgcggttggacaaagctcggttccgcagtcaccccgacctcgaagtgctgacccacggcctgacgctgtgggatctcgatcgggtgttcaaggtcgacggctttgccggtgcgcagtacaagaaactgcgcgacgtgctgggcttgctgcgcgatgcctactgccgccacatcggcgtggagtacgcccatatcctcgaccccgaacaaaaggagtggctcgaacaacgggtcgagaccaagcacgtcaaacccactgtggcccaacagaaatacatcctcagcaagctcaacgccgccgaggcctttgaaacgttcctacagaccaagtacgtcggccagaagcggttctcgctggaaggcgccgaaagcgtgatcccgatgatggacgcggcgatcgaccagtgcgctgagcacggcctcgacgaggtggtcatcgggatgccgcaccggggccggctcaacgtgctggccaacatcgtcggcaagccgtactcgcagatcttcaccgagttcgagggcaacctgaatccgtcgcaggcgcacggctccggtgacgtcaagtaccacctgggcgccaccgggctgtacctgcagatgttcggcgacaacgacattcaggtgtcgctgaccgccaacccgtcgcatctggaggccgtcgacccggtgctggagggattggtgcgggccaagcaggatctgctcgaccacggaagcatcgacagcgacggccaacgggcgttctcggtggtgccgctgatgttgcatggcgatgccgcgttcgccggtcagggtgtggtcgccgagacgctgaacctggcgaatctgccgggctaccgcgtcggcggcaccatccacatcatcgtcaacaaccagatcggcttcaccaccgcgcccgagtattccaggtccagcgagtactgcaccgacgtcgcaaagatgatcggggcaccgatctttcacgtcaacggcgacgacccggaggcgtgtgtctgggtggcgcggttggcggtggacttccgacaacggttcaagaaggacgtcgtcatcgacatgctgtgctaccgccgccgcgggcacaacgagggtgacgacccgtcgatgaccaacccctacatgtacgacgtcgtcgacaccaagcgcggggcccgcaaaagctacaccgaagccctgatcggacgtggcgacatctcgatgaaggaggccgaggacgcgctgcgcgactaccagggccagctggaacgggtgttcaacgaagtgcgcgagctggagaagcacggtgtgcagccgagcgagtcggtcgagtccgaccagatgattcccgcggggctggccactgcggtggacaagtcgctgctggcccggatcggcgatgcgttcctcgccttgccgaacggcttcaccgcgcacccgcgagtccaaccggtgctggagaagcgccgggagatggcctatgaaggcaagatcgactgggcctttggcgagctgctggcgctgggctcgctggtggccgaaggcaagctggtgcgcttgtcggggcaggacagccgccgcggcaccttctcccagcggcattcggttctcatcgaccgccacactggcgaggagttcacaccactgcagctgctggcgaccaactccgacggcagcccgaccggcggaaagttcctggtctacgactcgccactgtcggagtacgccgccgtcggcttcgagtacggctacactgtgggcaatccggacgccgtggtgctctgggaggcgcagttcggcgacttcgtcaacggcgcacagtcgatcatcgacgagttcatcagctccggtgaggccaagtggggccaattgtccaacgtcgtgctgctgttaccgcacgggcacgaggggcagggacccgaccacacttctgcccggatcgaacgcttcttgcagttgtgggcggaaggttcgatgaccatcgcgatgccgtcgactccgtcgaactacttccacctgctacgccggcatgccctggacggcatccaacgcccgctgatcgtgttcacgcccaagtcgatgttgcgtcacaaggccgccgtcagcgaaatcaaggacttcaccgagatcaagttccgctcagtgctggaggaacccacctatgaggacggcatcggagaccgcaacaaggtcagccggatcctgctgaccagtggcaagctgtattacgagctggccgcccgcaaggccaaggacaaccgcaatgacctcgcgatcgtgcggcttgaacagctcgccccgctgcccaggcgtcgactgcgtgaaacgctggaccgctacgagaacgtcaaggagttcttctgggtccaagaggaaccggccaaccagggtgcgtggccgcgattcgggctcgaactacccgagctgctgcctgacaagttggccgggatcaagcgaatctcgcgccgggcgatgtcagccccgtcgtcaggctcgtcgaaggtgcacgccgtcgaacagcaggagatcctcgacgaggcgttcggctaa

SEQ ID NO: 50 - protein, 1231 aa, Mycobacterium bovis
MANISSPFGQNEWLVEEMYRKFRDDPSSVDPSWHEFLVDYSPEPTSQPAAEPTRVTSPLVAERAAAAAPQAPPKPADTAAAGNGVVAALAAKTAVPPPAEGDEVAVLRGAAAAVVKNMSASLEVPTATSVRAVPAKLLIDNRIVINNQLKRTRGGKISFTHLLGYALVQAVKKFPNMNRHYTEVDGKPTAVTPAHTNLGLAIDLQGKDGKRSLVVAGIKRCETMRFAQFVTAYEDIVRRARDGKLTTEDFAGVTISLTNPGTIGTVHSVPRLMPGQGAIIGVGAMEYPAEFQGASEERIAELGIGKLITLTSTYDHRIIQGAESGDFLRTIHELLLSDGFWDEVFRELSIPYLPVRWSTDNPDSIVDKNARVMNLIAAYRNRGHLMADTDPLRLDKARFRSHPDLEVLTHGLTLWDLDRVFKVDGFAGAQYKKLRDVLGLLRDAYCRHIGVEYAHILDPEQKEWLEQRVETKHVKPTVAQQKYILSKLNAAEAFETFLQTKYVGQKRFSLEGAESVIPMMDAAIDQCAEHGLDEVVIGMPHRGRLNVLANIVGKPYSQIFTEFEGNLNPSQAHGSGDVKYHLGATGLYLQMFGDNDIQVSLTANPSHLEAVDPVLEGLVRAKQDLLDHGSIDSDGQRAFSVVPLMLHGDAAFAGQGVVAETLNLANLPGYRVGGTIHIIVNNQIGFTTAPEYSRSSEYCTDVAKMIGAPIFHVNGDDPEACVWVARLAVDFRQRFKKDVVIDMLCYRRRGHNEGDDPSMTNPYMYDVVDTKRGARKSYTEALIGRGDISMKEAEDALRDYQGQLERVFNEVRELEKHGVQPSESVESDQMIPAGLATAVDKSLLARIGDAFLALPNGFTAHPRVQPVLEKRREMAYEGKIDWAFGELLALGSLVAEGKLVRLSGQDSRRGTFSQRHSVLIDRHTGEEFTPLQLLATNSDGSPTGGKFLVYDSPLSEYAAVGFEYGYTVGNPDAVVLWEAQFGDFVNGAQSIIDEFISSGEAKWGQLSNVVLLLPHGHEGQGPDHTSARIERFLQLWAEGSMTIAMPSTPSNYFHLLRRHALDGIQRPLIVFTPKSMLRHKAAVSEIKDFTEIKFRSVLEEPTYEDGIGDRNKVSRILLTSGKLYYELAARKAKDNRNDLAIVRLEQLAPLPRRRLRETLDRYENVKEFFWVQEEPANQGAWPRFGLELPELLPDKLAGIKRISRRAMSAPSSGSSKVHAVEQQEILDEAFG

SEQ ID NO: 51 - DNA, 1356 bp, Porphyromonas gingivalis
atggaaatcaaagaaatggtgagccttgcacgcaaggctcagaaggagtatcaagctacccataaccaagaagcagttgacaacatttgccgagctgcagcaaaagttatttatgaaaatgcagctattctggctcgcgaagcagtagacgaaaccggcatgggcgtttacgaacacaaagtggccaagaatcaaggcaaatccaaaggtgtttggtacaacctccacaataaaaaatcgattggtatcctcaatatagacgagcgtaccggtatgatcgagattgcaaagcctatcggagttgtaggagccgtaacgccgacgaccaacccgatcgttactccgatgagcaatatcatctttgctcttaagacctgcaatgccatcattattgccccccaccccagatccaaaaaatgctctgcacacgcagttcgtctgatcaaagaagctatcgctccgttcaacgtaccggaaggtatggttcagatcatcgaagaacccagcatcgagaagacgcaggaactcatgggcgccgtagacgtagtagttgctacgggtggtatgggcatggtgaagtctgcatattcttcaggaaagccttctttcggtgttggagccggtaacgttcaggtgatcgtggatagcaacatcgatttcgaagctgctgcagaaaaaatcatcaccggtcgtgctttcgacaacggtatcatctgctcaggcgaacagagcatcatctacaacgaggctgacaaggaagcagttttcacagcattccgcaaccacggtgcatatttctgtgacgaagccgaaggagatcgggctcgtgcagctatcttcgaaaatggagccatcgcgaaagatgtagtaggtcagagcgttgccttcattgccaagaaagcaaacatcaatatccccgagggtacccgtattctcgttgttgaagctcgcggcgtaggagcagaagacgttatctgtaaggaaaagatgtgtcccgtaatgtgcgccctcagctacaagcacttcgaagaaggtgtagaaatcgcacgtacgaacctcgccaacgaaggtaacggccacacctgtgctatccactccaacaatcaggcacacatcatcctcgcaggatcagagctgacggtatctcgtatcgtagtgaatgctccgagtgccactacagcaggcggtcacatccaaaacggtcttgccgtaaccaatacgctcggatgcggatcatggggtaataactctatctccgagaacttcacttacaagcacctcctcaacatttcacgcatcgcaccgttgaattcaagcattcacatccccgatgacaaagaaatctgggaactctaa

SEQ ID NO: 52 - protein, 451 aa, Porphyromonas gingivalis
MEIKEMVSLARKAQKEYQATHNQEAVDNICRAAAKVIYENAAILAREAVDETGMGVYEHKVAKNQGKSKGVWYNLHNKKSIGILNIDERTGMIEIAKPIGVVGAVTPTTNPIVTPMSNIIFALKTCNAIIIAPHPRSKKCSAHAVRLIKEAIAPFNVPEGMVQIIEEPSIEKTQELMGAVDVVVATGGMGMVKSAYSSGKPSFGVGAGNVQVIVDSNIDFEAAAEKIITGRAFDNGIICSGEQSIIYNEADKEAVFTAFRNHGAYFCDEAEGDRARAAIFENGAIAKDVVGQSVAFIAKKANINIPEGTRILVVEARGVGAEDVICKEKMCPVMCALSYKHFEEGVEIARTNLANEGNGHTCAIHSNNQAHIILAGSELTVSRIVVNAPSATTAGGHIQNGLAVTNTLGCGSWGNNSISENFTYKHLLNISRIAPLNSSIHIPDDKEIWEL

SEQ ID NO: 53 - DNA, 1116 bp, Porphyromonas gingivalis
atgcaacttttcaaactcaagagtgtaacacatcactttgacacttttgcagaatttgccaaggaattctgtcttggagaacgcgacttggtaattaccaacgagttcatctatgaaccgtatatgaaggcatgccagctcccctgccattttgttatgcaggagaaatatgggcaaggcgagccttctgacgaaatgatgaataacatcttggcagacatccgtaatatccagttcgaccgcgtaatcggtatcggaggaggtacggttattgacatctctaaacttttcgttctgaaaggattaaatgatgtactcgatgcattcgaccgcaaaatacctcttatcaaagagaaagaactgatcattgtgcccacaacatgcggaacgggtagcgaggtgacgaacatttctatcgcagaaatcaaaagccgtcacaccaaaatgggattggctgacgatgccattgttgcagaccatgccatcatcatacctgaacttctgaagagcttgcctttccacttctacgcatgcagtgcaatcgatgctcttatccatgccatcgagtcatacgtatctcctaaagccagtccatattctcgtctgttcagtgaggcggcttgggacattatcctggaagtattcaagaaaatcgccgaacacggccctgaataccgcttcgaaaagctgggagaaatgatcatggccagcaactatgccggtatagccttcggaaatgcaggagtaggagccgtccacgcactatcctacccgttgggaggcaactatcacgtgccgcatggagaagcaaactatcagttcttcacagaggtattcaaagtataccaaaagaagaatcctttcggctatatagtcgaactcaactggaagctctccaagatactgaactgccagcccgaatacgtatatccgaagctggatgaacttctcggatgccttcttaccaagaaacctttgcacgaatacggcatgaaggacgaagaggtaagaggctttgcggaatcagtgcttaagacacagcaaagattgctcgccaacaactacgtagagcttactgtagatgagatcgaaggtatctacagaagactctactaa

SEQ ID NO: 54 - protein, 371 aa, Porphyromonas gingivalis
MQLFKLKSVTHHFDTFAEFAKEFCLGERDLVITNEFIYEPYMKACQLPCHFVMQEKYGQGEPSDEMMNNILADIRNIQFDRVIGIGGGTVIDISKLFVLKGLNDVLDAFDRKIPLIKEKELIIVPTTCGTGSEVTNISIAEIKSRHTKMGLADDAIVADHAIIIPELLKSLPFHFYACSAIDALIHAIESYVSPKASPYSRLFSEAAWDIILEVFKKIAEHGPEYRFEKLGEMIMASNYAGIAFGNAGVGAVHALSYPLGGNYHVPHGEANYQFFTEVFKVYQKKNPFGYIVELNWKLSKILNCQPEYVYPKLDELLGCLLTKKPLHEYGMKDEEVRGFAESVLKTQQRLLANNYVELTVDEIEGIYRRLY

SEQ ID NO: 55 - DNA, 1296 bp, Porphyromonas gingivalis
atgaaagacgtattagcggaatatgcctcccgaattgtttcggccgaagaagccgtaaaacatatcaaaaatggagaacgggtagctttgtcacatgctgccggagttcctcagagttgtgttgatgcactggtacaacaggccgaccttttccagaatgtcgaaatttatcacatgctttgtctcggcgaaggaaaatatatggcacctgaaatggcccctcacttccgacacataaccaattttgtaggtggtaattctcgtaaagcagttgaggaaaatagagccgacttcattccggtattcttttatgaagtgccatcaatgattcgcaaagacatccttcacatagatgtcgccatcgttcagctttcaatgcctgatgagaatggttactgtagttttggagtatcttgcgattatagcaaaccggcagcagaaagcgctcatttagttataggggaaatcaaccgtcaaatgccatatgtacatggcgacaacttgattcacatatcgaagttggattacatcgtgatggcagactaccctatctattctcttgcaaagcccaaaatcggagaagtagaagaagctatcgggcgtaattgtgccgagcttattgaagatggtgccacactccaactcggtatcggcgcgattcctgatgcagccctgttattcctcaaggacaaaaaagatctggggatccataccgagatgttctccgatggtgttgtcgaattagttcgcagtggagtaattacaggaaagaaaaagacacttcaccccggaaagatggtcgcaaccttcttaatgggaagcgaagacgtatatcatttcatcgacaaaaatcccgatgtagaactttatccggtagattacgtcaatgatccgcgagtaatcgctcaaaatgataatatggtcagcatcaatagctgtatcgaaatcgatcttatgggacaagtcgtgtccgaatgtataggaagcaagcaattcagcggaaccggcggtcaagtagattatgttcgtggagcagcatggtctaaaaacggcaaaagcatcatggcaattccctcaacagccaaaaacggtactgcatctcgaattgtacctataattgcagagggagctgctgtaacaaccctccgcaacgaagtcgattacgttgtaaccgaatacggtatagcacaactcaaaggaaagagtttgcgccagcgagcagaagctcttattgccatagcccacccggatttcagagaggaactaacgaaacatctccgcaaacgtttcggataa

SEQ ID NO: 56 - protein, 431 aa, Porphyromonas gingivalis
MKDVLAEYASRIVSAEEAVKHIKNGERVALSHAAGVPQSCVDALVQQADLFQNVEIYHMLCLGEGKYMAPEMAPHFRHITNFVGGNSRKAVEENRADFIPVFFYEVPSMIRKDILHIDVAIVQLSMPDENGYCSFGVSCDYSKPAAESAHLVIGEINRQMPYVHGDNLIHISKLDYIVMADYPIYSLAKPKIGEVEEAIGRNCAELIEDGATLQLGIGAIPDAALLFLKDKKDLGIHTEMFSDGVVELVRSGVITGKKKTLHPGKMVATFLMGSEDVYHFIDKNPDVELYPVDYVNDPRVIAQNDNMVSINSCIEIDLMGQVVSECIGSKQFSGTGGQVDYVRGAAWSKNGKSIMAIPSTAKNGTASRIVPIIAEGAAVTTLRNEVDYVVTEYGIAQLKGKSLRQRAEALIAIAHPDFREELTKHLRKRFG

SEQ ID NO: 57 - DNA, 906 bp, Clostridium acetobutylicum
atgattaagagttttaatgaaattatcatgaaggtaaagagcaaagaaatgaaaaaagttgctgttgctgtagcacaagacgagccagtacttgaagcagtaagagatgctaagaaaaatggtattgcagatgctattcttgttggagaccatgacgaaatcgtgtcaatcgcgcttaaaataggaatggatgtaaatgattttgaaatagtaaacgagcctaacgttaagaaagctgctttaaaggcagtagagcttgtatcaactggaaaagctgatatggtaatgaagggacttgtaaatacagcaactttcttaagatctgtattaaacaaagaagttggacttagaacaggaaaaactatgtctcacgttgcagtatttgaaactgagaaatttgatagactattatttttaacagatgttgctttcaatacttatcctgaattaaaggaaaaaattgatatagtaaacaattcagttaaggttgcacatgcaataggaattgaaaatccaaaggttgctccaatttgtgcagttgaggttataaaccctaaaatgccatcaacacttgatgcagcaatgctttcaaaaatgagtgacagaggacaaattaaaggttgtgtagttgacggacctttagcacttgatatagctttatcagaagaagcagcacatcataagggagtaacaggagaagttgctggaaaagctgatatcttcttaatgccaaacatagaaacaggaaatgtaatgtataagactttaacatatacaactgattcaaaaaatggaggaatcttagttggaacttctgcaccagttgttttaacttcaagagctgacagccatgaaacaaaaatgaactctatagcacttgcagctttagttgcaggcaataaataa

SEQ ID NO: 58 - protein, 301 aa, Clostridium acetobutylicum
MIKSFNEIIMKVKSKEMKKVAVAVAQDEPVLEAVRDAKKNGIADAILVGDHDEIVSIALKIGMDVNDFEIVNEPNVKKAALKAVELVSTGKADMVMKGLVNTATFLRSVLNKEVGLRTGKTMSHVAVFETEKFDRLLFLTDVAFNTYPELKEKIDIVNNSVKVAHAIGIENPKVAPICAVEVINPKMPSTLDAAMLSKMSDRGQIKGCVVDGPLALDIALSEEAAHHKGVTGEVAGKADIFLMPNIETGNVMYKTLTYTTDSKNGGILVGTSAPVVLTSRADSHETKMNSIALAALVAGNK

SEQ ID NO: 59 - DNA, 1068 bp, Clostridium acetobutylicum
atgtatagattactaataatcaatcctggctcgacctcaactaaaattggtatttatgacgatgaaaaagagatatttgagaagactttaagacattcagctgaagagatagaaaaatataacactatatttgatcaatttcaattcagaaagaatgtaattttagatgcgttaaaagaagcaaacatagaagtaagttctttaaatgctgtagttggaagaggcggactcttaaagccaatagtaagtggaacttatgcagtaaatcaaaaaatgcttgaagaccttaaagtaggagttcaaggtcagcatgcgtcaaatcttggtggaattattgcaaatgaaatagcaaaagaaataaatgttccagcatacatagttgatccagttgttgtggatgagcttgatgaagtttcaagaatatcaggaatggctgacattccaagaaaaagtatattccatgcattaaatcaaaaagcagttgctagaagatatgcaaaagaagttggaaaaaaatacgaagatcttaatttaatcgtagtccacatgggtggaggtacttcagtaggtactcataaagatggtagagtaatagaagttaataatacacttgatggagaaggtccattctcaccagaaagaagtggtggagttccaataggagatcttgtaagattgtgcttcagcaacaaatatacttatgaagaagtaatgaaaaagataaacggcaaaggcggagttgttagttacttaaatactatcgattttaaggctgtagttgataaagctcttgaaggagataagaaatgtgcacttatatatgaagctttcacattccaggtagcaaaagagataggaaaatgttcaaccgttttaaaaggaaatgtagatgcaataatcttaacaggcggaattgcgtacaacgagcatgtatgtaatgccatagaggatagagtaaaattcatagcacctgtagttagatatggtggagaagatgaacttcttgcacttgcagaaggtggacttagagttttaagaggagaagaaaaagctaaggaatacaaataa

SEQ ID NO: 60 - protein, 355 aa, Clostridium acetobutylicum
MYRLLIINPGSTSTKIGIYDDEKEIFEKTLRHSAEEIEKYNTIFDQFQFRKNVILDALKEANIEVSSLNAVVGRGGLLKPIVSGTYAVNQKMLEDLKVGVQGQHASNLGGIIANEIAKEINVPAYIVDPVVVDELDEVSRISGMADIPRKSIFHALNQKAVARRYAKEVGKKYEDLNLIVVHMGGGTSVGTHKDGRVIEVNNTLDGEGPFSPERSGGVPIGDLVRLCFSNKYTYEEVMKKINGKGGVVSYLNTIDFKAVVDKALEGDKKCALIYEAFTFQVAKEIGKCSTVLKGNVDAIILTGGIAYNEHVCNAIEDRVKFIAPVVRYGGEDELLALAEGGLRVLRGEEKAKEYK

SEQ ID NO: 61 - DNA, 906 bp, Artificial Sequence
  Description of Artificial Sequence: Synthetic polynucleotide
atgattaagagttttaatgaaattatcatgaaggtaaagagcaaagaaatgaaaaaagttgctgttgctgtagcacaagacgagccagtacttgaagcagtacgcgatgctaagaaaaatggtattgcagatgctattcttgttggcgaccatgacgaaatcgtgtcaatcgcgcttaaaataggcatggatgtaaatgattttgaaatagtaaacgagcctaacgttaagaaagctgctttaaaggcagtagagctggtatcaactggaaaagctgatatggtaatgaagggacttgtaaatacagcaactttcttacgctctgtattaaacaaagaagttggactgagaacaggaaaaactatgtctcacgttgcagtatttgaaactgagaaatttgatcgtctgttatttttaacagatgttgctttcaatacttatcctgaattaaaggaaaaaattgatatcgtaaacaattcagttaaggttgcacatgcaataggtattgaaaatccaaaggttgctccaatttgtgcagttgaggttataaaccctaaaatgccatcaacacttgatgcagcaatgctttcaaaaatgagtgacagaggacaaattaaaggttgtgtagttgacggaccgttagcacttgatatcgctttatcagaagaagcagcacatcataagggcgtaacaggagaagttgctggaaaagctgatatcttcttaatgccaaacattgaaacaggaaatgtaatgtataagactttaacatatacaactgatagcaaaaatggcggaatcttagttggaacttctgcaccagttgttttaacttcacgcgctgacagccatgaaacaaaaatgaactctattgcacttgcagctttagttgcaggcaataaataa

SEQ ID NO: 62 - DNA, 906 bp, Artificial Sequence
  Description of Artificial Sequence: Synthetic polynucleotide
atgattaagagttttaatgaaattatcatgaaggtaaagagcaaagaaatgaaaaaagttgctgttgctgtagcacaagacgagccagtacttgaagcagtacgcgatgctaagaaaaatggtattgccgatgctattctggttggcgaccatgacgaaatcgtgtctatcgcgctgaaaataggcatggatgtaaatgattttgaaattgttaacgagcctaacgttaagaaagctgcgttaaaggcagtagagctggtatcaactggaaaagctgatatggtaatgaagggactggtaaataccgcaactttcttacgctctgtattaaacaaagaagttggtctgcgtacaggaaaaaccatgtctcacgttgcagtatttgaaactgagaaatttgatcgtctgttatttttaacagatgttgctttcaatacttatcctgaattaaaggaaaaaattgatatcgttaacaatagcgttaaggttgcacatgccattggtattgaaaatccaaaggttgctccaatttgtgcagttgaggttattaacccgaaaatgccatcaacacttgatgcagcaatgctttcaaaaatgagtgaccgcggacaaattaaaggttgtgtagttgacggaccgctggcacttgatatcgctttatcagaagaagcagcacatcataaaggcgtaacaggagaagttgctggaaaagctgatatcttcttaatgccaaacattgaaacaggaaatgtaatgtataagacgttaacctataccactgatagcaaaaatggcggcatcctggttggaacttctgcaccagttgttttaacttcacgcgctgacagccatgaaacaaaaatgaactctattgcactggcagcgctggttgcaggcaataaataa

SEQ ID NO: 63 - DNA, 906 bp, Artificial Sequence
  Description of Artificial Sequence: Synthetic polynucleotide
atgattaagagttttaatgaaattatcatgaaggtaaagagcaaagaaatgaaaaaagttgctgttgctgttgcacaagacgagccggtactggaagcggtacgcgatgctaagaaaaatggtattgccgatgctattctggttggcgaccatgacgaaatcgtctctatcgcgctgaaaattggcatggatgttaatgattttgaaattgttaacgagcctaacgttaagaaagctgcgctgaaggcggtagagctggtttccaccggaaaagctgatatggtaatgaaagggctggtgaataccgcaactttcttacgcagcgtactgaacaaagaagttggtctgcgtaccggaaaaaccatgagtcacgttgcggtatttgaaactgagaaatttgatcgtctgctgtttctgaccgatgttgctttcaatacttatcctgaattaaaagaaaaaattgatatcgttaacaatagcgttaaggttgcgcatgccattggtattgaaaatccaaaggttgctccaatttgtgcagttgaggttattaacccgaaaatgccatcaacacttgatgccgcaatgcttagcaaaatgagtgaccgcggacaaattaaaggttgtgtggttgacggcccgctggcactggatatcgcgttaagcgaagaagcggcacatcataaaggcgtaaccggcgaagttgctggaaaagctgatatcttcctgatgccaaacattgaaacaggcaatgtaatgtataaaacgttaacctataccactgatagcaaaaatggcggcatcctggttggaacttctgcaccagttgttttaacctcacgcgctgacagccatgaaaccaaaatgaacagcattgcactggcagcgctggttgcaggcaataaataa

SEQ ID NO: 64 - DNA, 906 bp, Artificial Sequence
  Description of Artificial Sequence: Synthetic polynucleotide
atgattaaaagttttaacgaaattatcatgaaagtgaaaagcaaagagatgaaaaaagtggcggttgcggttgcgcaggatgaaccggtgctggaagcggtgcgcgatgccaaaaaaaacggtattgccgatgccattctggtgggcgatcacgatgaaattgtctctattgcgctgaaaattggcatggatgttaacgattttgaaattgttaatgaaccgaacgtgaaaaaagcggcgctgaaagcggttgaactggtttccaccggtaaagccgatatggtgatgaaagggctggtgaataccgcaaccttcctgcgcagcgtgctgaataaagaagtgggtctgcgtaccggtaaaaccatgagtcatgttgcggtgtttgaaaccgaaaaatttgaccgtctgctgtttctgaccgatgttgcgtttaatacctatccggaactgaaagagaaaattgatatcgttaataacagcgtgaaagtggcgcatgccattggtattgaaaacccgaaagtggcgccgatttgcgcggttgaagtgattaacccgaaaatgccgtcaacgctggatgccgcgatgctcagcaaaatgagcgatcgcggtcaaatcaaaggctgtgtggttgatggcccgctggcgctggatatcgcgcttagcgaagaagcggcgcatcataaaggcgtgaccggcgaagtggccggtaaagccgatattttcctgatgccgaatattgaaaccggcaacgtgatgtataaaacgctgacctataccaccgacagcaaaaacggcggcattctggtgggtaccagcgcgccggtggtgctgacctcgcgcgccgacagccatgaaaccaaaatgaacagcattgcgctggcggcgctggtggccggtaataaataa

SEQ ID NO: 65 - DNA, 1068 bp, Artificial Sequence
  Description of Artificial Sequence: Synthetic polynucleotide
atgtatcgtttactgattatcaatcctggctcgacctcaactaaaattggtatttatgacgatgaaaaagagatatttgagaagactttacgtcattcagctgaagagatagaaaaatataacactatatttgatcaatttcagttcagaaagaatgtaattctcgatgcgttaaaagaagcaaacattgaagtaagttctttaaatgctgtagttggacgcggcggactgttaaagccaatagtaagtggaacttatgcagtaaatcaaaaaatgcttgaagaccttaaagtaggcgttcaaggtcagcatgcgtcaaatcttggtggaattattgcaaatgaaatagcaaaagaaataaatgttccagcatacatcgttgatccagttgttgtggatgagcttgatgaagtttcacgtatatcaggaatggctgacattccacgtaaaagtatattccatgcattaaatcaaaaagcagttgctagacgctatgcaaaagaagttggaaaaaaatacgaagatcttaatttaatcgtggtccacatgggtggcggtacttcagtaggtactcataaagatggtagagtaattgaagttaataatacacttgatggagaaggtccattctcaccagaaagaagtggtggcgttccaataggcgatcttgtacgtttgtgcttcagcaacaaatatacttatgaagaagtaatgaaaaagataaacggcaaaggcggcgttgttagttacttaaatactatcgattttaaggctgtagttgataaagctcttgaaggcgataagaaatgtgcacttatatatgaagctttcacattccaggtagcaaaagagataggaaaatgttcaaccgttttaaaaggaaatgtagatgcaataatcttaacaggcggaattgcgtacaacgagcatgtatgtaatgccatagaggatagagtaaaattcattgcacctgtagttcgttatggtggagaagatgaacttcttgcacttgcagaaggtggactgcgcgttttacgcggagaagaaaaagctaaggaatacaaataa

SEQ ID NO: 66 - DNA, 1068 bp, Artificial Sequence
  Description of Artificial Sequence: Synthetic polynucleotide
atgtatcgtttactgattatcaatcctggctcgacctcaactaaaattggtatttatgacgatgaaaaagagatatttgagaagacgttacgtcattcagctgaagagattgaaaaatataacactatatttgatcaatttcagttccgcaagaatgtgattctcgatgcgttaaaagaagcaaacattgaagtcagttctttaaatgctgtagttggacgcggcggactgttaaagccaattgtcagtggaacttatgcagtaaatcaaaaaatgcttgaagaccttaaagtgggcgttcaaggtcagcatgccagcaatcttggtggcattattgccaatgaaatcgcaaaagaaatcaatgttccagcatacatcgttgatccggttgttgtggatgagcttgatgaagttagccgtataagcggaatggctgacattccacgtaaaagtatattccatgcattaaatcaaaaagcagttgctcgtcgctatgcaaaagaagttggtaaaaaatacgaagatcttaatttaatcgtggtccacatgggtggcggtacttcagtaggtactcataaagatggtcgcgtgattgaagttaataatacacttgatggcgaaggtccattctcaccagaacgtagtggtggcgttccaattggcgatctggtacgtttgtgcttcagcaacaaatatacttatgaagaagtgatgaaaaagataaacggcaaaggcggcgttgttagttacctgaatactatcgattttaaggctgtagttgataaagcgcttgaaggcgataagaaatgtgcactgatttatgaagctttcaccttccaggtagcaaaagagattggtaaatgttcaaccgttttaaaaggaaatgttgatgccattatcttaacaggcggcattgcttacaacgagcatgtatgtaatgccattgaggatcgcgtaaaattcattgcacctgtagttcgttatggtggcgaagatgaactgctggcactggcagaaggtggactgcgcgttttacgcggcgaagaaaaagcgaaggaatacaaataa

SEQ ID NO: 67 - DNA, 1068 bp, Artificial Sequence
  Description of Artificial Sequence: Synthetic polynucleotide
atgtatcgtctgctgattatcaatcctggctcgacctcaactaaaattggtatttatgacgatgaaaaagagatatttgagaaaacgttacgtcatagcgctgaagagattgaaaaatataacactatttttgatcaatttcagttccgcaagaatgtgattctcgatgcgctgaaagaagcaaacattgaagtcagttcgctgaatgcggtagttggtcgcggcggtctgctgaagccaattgtcagcggcacttatgcggtaaatcaaaaaatgctggaagacctgaaagtgggcgttcaggggcagcatgccagcaatcttggtggcattattgccaatgaaatcgccaaagaaatcaatgttccggcatacatcgttgatccggttgttgtggatgagctggatgaagttagccgtatcagcggaatggctgacattccacgtaaaagtattttccatgcactgaatcaaaaagcggttgcgcgtcgctatgcaaaagaagttggtaaaaaatacgaagatcttaatctgatcgtggtgcatatgggtggcggtactagcgtcggtactcataaagatggtcgcgtgattgaagttaataatacacttgatggcgaaggtccattctcaccagaacgtagcggtggcgttccaattggcgatctggtacgtttgtgcttcagcaacaaatatacctatgaagaagtgatgaaaaagataaacggcaaaggcggcgttgttagttacctgaatactatcgattttaaggcggtagttgataaagcgctggaaggcgataagaaatgtgcactgatttatgaagcgttcaccttccaggtggcaaaagagattggtaaatgttcaaccgttctgaaaggcaatgttgatgccattatcctgaccggcggcattgcttacaacgagcatgtttgtaatgccattgaggatcgcgtaaaattcattgcacctgtggttcgttatggtggcgaagatgaactgctggcactggcagaaggtggtctgcgcgttttacgcggcgaagaaaaagcgaaagaatacaaataa

SEQ ID NO: 68 - DNA, 1068 bp, Artificial Sequence
  Description of Artificial Sequence: Synthetic polynucleotide
atgtatcgtctgctgattatcaacccgggcagcacctcaaccaaaattggtatttacgacgatgaaaaagagatttttgaaaaaacgctgcgtcacagcgcagaagagattgaaaaatacaacaccattttcgatcagttccagttccgcaaaaacgtgattctcgatgcgctgaaagaagccaatattgaagtctcctcgctgaatgcggtggtcggtcgcggcggtctgctgaaaccgattgtcagcggcacttatgcggttaatcagaaaatgctggaagatctgaaagtgggcgtgcaggggcagcatgccagcaatctcggcggcattatcgccaatgaaatcgccaaagagatcaacgtgccggcttatatcgtcgatccggtggtggttgatgaactggatgaagtcagccgtatcagcggcatggcggatattccgcgtaaaagcattttccatgcgctgaatcagaaagcggttgcgcgtcgctatgccaaagaagtgggtaaaaaatatgaagatctcaatctgattgtggtgcatatgggcggcggcaccagcgtcggtacgcataaagatggtcgcgtgattgaagtgaataacacgctggatggcgaagggccgttctcgccggaacgtagcggcggcgtgccgattggcgatctggtgcgtctgtgtttcagcaataaatacacctacgaagaagtgatgaaaaaaatcaacggcaaaggcggcgtggttagctatctgaataccatcgattttaaagcggtggttgataaagcgctggaaggcgataaaaaatgcgcgctgatttatgaagcgtttaccttccaggtggcgaaagagattggtaaatgttcaaccgtgctgaaaggcaacgttgatgccattattctgaccggcggcattgcttataacgaacatgtttgtaatgccattgaagatcgcgtgaaatttattgcgccggtggtgcgttacggcggcgaagatgaactgctggcgctggcggaaggcggtctgcgcgtgctgcgcggcgaagaaaaagcgaaagagtacaaataa

SEQ ID NO: 69 - DNA, 1407 bp, Clostridium biejerinckii
atgaataaagacacactaatacctacaactaaagatttaaaagtaaaaacaaatggtgaaaacattaatttaaagaactacaaggataattcttcatgtttcggagtattcgaaaatgttgaaaatgctataagcagcgctgtacacgcacaaaagatattatcccttcattatacaaaagagcaaagagaaaaaatcataactgagataagaaaggccgcattacaaaataaagaggtcttggctacaatgattctagaagaaacacatatgggaagatatgaggataaaatattaaaacatgaattggtagctaaatatactcctggtacagaagatttaactactactgcttggtcaggtgataatggtcttacagttgtagaaatgtctccatatggtgttataggtgcaataactccttctacgaatccaactgaaactgtaatatgtaatagcataggcatgatagctgctggaaatgctgtagtatttaacggacacccatgcgctaaaaaatgtgttgcctttgctgttgaaatgataaataaggcaattatttcatgtggcggtcctgaaaatctagtaacaactataaaaaatccaactatggagtctctagatgcaattattaagcatccttcaataaaacttctttgcggaactgggggtccaggaatggtaaaaaccctcttaaattctggtaagaaagctataggtgctggtgctggaaatccaccagttattgtagatgatactgctgatatagaaaaggctggtaggagcatcattgaaggctgttcttttgataataatttaccttgtattgcagaaaaagaagtatttgtttttgagaatgttgcagatgatttaatatctaacatgctaaaaaataatgctgtaattataaatgaagatcaagtatcaaaattaatagatttagtattacaaaaaaataatgaaactcaagaatactttataaacaaaaaatgggtaggaaaagatgcaaaattattcttagatgaaatagatgttgagtctccttcaaatgttaaatgcataatctgcgaagtaaatgcaaatcatccatttgttatgacagaactcatgatgccaatattgccaattgtaagagttaaagatatagatgaagctattaaatatgcaaagatagcagaacaaaatagaaaacatagtgcctatatttattctaaaaatatagacaacctaaatagatttgaaagagaaatagatactactatttttgtaaagaatgctaaatcttttgctggtgttggttatgaagcagaaggatttacaactttcactattgctggatctactggtgagggaataacctctgcaaggaattttacaagacaaagaagatgtgtacttgccggctaa

SEQ ID NO: 70 - protein, 468 aa, Clostridium biejerinckii
MNKDTLIPTTKDLKVKTNGENINLKNYKDNSSCFGVFENVENAISSAVHAQKILSLHYTKEQREKIITEIRKAALQNKEVLATMILEETHMGRYEDKILKHELVAKYTPGTEDLTTTAWSGDNGLTVVEMSPYGVIGAITPSTNPTETVICNSIGMIAAGNAVVFNGHPCAKKCVAFAVEMINKAIISCGGPENLVTTIKNPTMESLDAIIKHPSIKLLCGTGGPGMVKTLLNSGKKAIGAGAGNPPVIVDDTADIEKAGRSIIEGCSFDNNLPCIAEKEVFVFENVADDLISNMLKNNAVIINEDQVSKLIDLVLQKNNETQEYFINKKWVGKDAKLFLDEIDVESPSNVKCIICEVNANHPFVMTELMMPILPIVRVKDIDEAIKYAKIAEQNRKHSAYIYSKNIDNLNRFEREIDTTIFVKNAKSFAGVGYEAEGFTTFTIAGSTGEGITSARNFTRQRRCVLAG

SEQ ID NO: 71 - DNA, 1407 bp, Artificial Sequence
  Description of Artificial Sequence: Synthetic polynucleotide
atgaataaagacacactaatacctacaactaaagatttaaaagtaaaaacaaatggtgaaaacattaatttaaagaactacaaggataattcttcatgtttcggcgtattcgaaaatgttgaaaatgctataagcagcgctgtacacgcacaaaagatattatcccttcattatacaaaagagcaacgtgaaaaaatcataactgagataagaaaggccgcattacaaaataaagaggtcttggctacaatgattctggaagaaacacatatgggacgttatgaggataaaatattaaaacatgaattggtagctaaatatactcctggtacagaagatttaactactactgcctggtcaggtgataatggtctgacagttgtagaaatgtctccatatggtgttattggtgcaataactccttctacgaatccaactgaaactgtaatatgtaatagcataggcatgattgctgctggaaatgctgtagtatttaacggacacccatgcgctaaaaaatgtgttgcctttgctgttgaaatgataaataaggcaattatttcatgtggcggtcctgaaaatctggtaacaactataaaaaatccaaccatggagtctctggatgcaattattaagcatccttcaataaaacttctttgcggaactgggggtccaggaatggtaaaaaccctgttaaattctggtaagaaagctataggtgctggtgctggaaatccaccagttattgtcgatgatactgctgatatagaaaaggctggtcgtagcatcattgaaggctgttcttttgataataatttaccttgtattgcagaaaaagaagtatttgtttttgagaatgttgcagatgatttaatatctaacatgctaaaaaataatgctgtaattataaatgaagatcaagtatcaaaattaatcgatttagtattacaaaaaaataatgaaactcaagaatactttataaacaaaaaatgggtaggaaaagatgcaaaattattcctcgatgaaatagatgttgagtctccttcaaatgttaaatgcataatctgcgaagtaaatgcaaatcatccatttgttatgacagaactgatgatgccaatattgccaattgtacgcgttaaagatatcgatgaagctattaaatatgcaaagatagcagaacaaaatagaaaacatagtgcctatatttattctaaaaatatcgacaacctgaatcgctttgaacgtgaaatagatactactatttttgtaaagaatgctaaatcttttgctggtgttggttatgaagcagaaggatttacaactttcactattgctggatctactggtgagggaataacctctgcacgtaattttacacgccaacgtcgctgtgtacttgccggctaa

SEQ ID NO: 72 - DNA, 1407 bp, Artificial Sequence
  Description of Artificial Sequence: Synthetic polynucleotide
atgaataaagacacactgatccctacaactaaagatttaaaagtaaaaacaaatggtgaaaacattaatttaaagaactacaaagataatagcagttgtttcggcgtattcgaaaatgttgaaaatgctatcagcagcgctgtacacgcacaaaagatattatcgctgcattatacaaaagagcaacgtgaaaaaatcatcactgagatacgtaaggccgcattacaaaataaagaggtgctggctacaatgattctggaagaaacacatatgggacgttatgaggataaaatattaaaacatgaactggtagctaaatatactcctggtacagaagatttaactactactgcctggagcggtgataatggtctgacagttgtagaaatgtctccatatggtgttattggtgcaataactccttctaccaatccaactgaaactgtaatttgtaatagcattggcatgattgctgctggaaatgctgtagtatttaacggacacccatgcgctaaaaaatgtgttgcctttgctgttgaaatgatcaataaggcaattattagctgtggcggtccggaaaatctggtaacaactataaaaaatccaaccatggagtctctggatgccattattaagcatccttcaataaaactgctttgcggaactggcggtccaggaatggtaaaaaccctgttaaattctggtaagaaagctattggtgctggtgctggaaatccaccagttattgtcgatgatactgctgatattgaaaaggctggtcgtagcatcattgaaggctgttcttttgataataatttaccttgtattgcagaaaaagaagtatttgtttttgagaatgttgcagatgatttaatatctaacatgctgaaaaataatgctgtaattatcaatgaagatcaggtatcaaaattaatcgatttagtattacaaaaaaataatgaaactcaagaatactttatcaacaaaaaatgggtaggtaaagatgcaaaattattcctcgatgaaatcgatgttgagtctccttcaaatgttaaatgcattatctgcgaagtgaatgccaatcatccatttgttatgacagaactgatgatgccaatattgccaattgtgcgcgttaaagatatcgatgaagctattaaatatgcaaagattgcagaacaaaatagaaaacatagtgcctatatttatagcaaaaatatcgacaacctgaatcgctttgaacgtgaaatcgatactactatttttgtaaagaatgctaaatcttttgctggtgttggttatgaagcagaaggatttaccactttcactattgctggatctactggtgagggcataacctctgcacgtaattttacccgccaacgtcgctgtgtactggccggctaa

SEQ ID NO: 73 - DNA, 1407 bp, Artificial Sequence
  Description of Artificial Sequence: Synthetic polynucleotide
atgaataaagacacgctgatcccgacaactaaagatctgaaagtaaaaaccaatggtgaaaacattaatctgaagaactacaaagataatagcagttgtttcggcgtattcgaaaatgttgaaaatgctatcagcagcgcggtacacgcacaaaagatactctcgctgcattataccaaagagcaacgtgaaaaaatcatcactgagatccgtaaggccgcattacaaaataaagaggtgctggcaacaatgattctggaagaaacacatatgggacgttatgaggataaaatactgaaacatgaactggtggcgaaatatacgcctggtactgaagatttaaccaccactgcctggagcggtgataatggtctgaccgttgtggaaatgtcgccttatggtgttattggtgcaattacgccttcaaccaatccaactgaaacggtaatttgtaatagcattggcatgattgctgctggaaatgcggtagtatttaacggtcacccctgcgctaaaaaatgtgttgcctttgctgttgaaatgatcaataaagcgattattagctgtggcggtccggaaaatctggtaaccactataaaaaatccaaccatggagtcgctggatgccattattaagcatccttcaatcaaactgctgtgcggcactggcggtccaggaatggtgaaaaccctgctgaatagcggtaagaaagcgattggtgctggtgctggaaatccaccagttattgtcgatgatactgctgatattgaaaaagcgggtcgtagcatcattgaaggctgttcttttgataataatttaccttgtattgcagaaaaagaagtatttgtttttgagaatgttgccgatgatctgatctctaacatgctgaaaaataatgcggtgattatcaatgaagatcaggttagcaaactgatcgatctggtattacaaaaaaataatgaaactcaagaatactttatcaacaaaaaatgggtaggtaaagatgcaaaactgttcctcgatgaaatcgatgttgagtcgccttcaaatgttaaatgcattatctgcgaagtgaatgccaatcatccatttgtgatgaccgaactgatgatgccaattttgccgattgtgcgcgttaaagatatcgatgaagcgattaaatatgcaaagattgcagaacaaaatcgtaaacatagtgcctatatttatagcaaaaatatcgacaacctgaatcgctttgaacgtgaaatcgataccactatttttgtgaagaatgctaaatcttttgctggtgttggttatgaagcagaaggttttaccactttcactattgctggaagcaccggtgaaggcattacctctgcacgtaattttacccgccaacgtcgctgtgtactggccggctaa

SEQ ID NO: 74 - DNA, 1407 bp, Artificial Sequence
  Description of Artificial Sequence: Synthetic polynucleotide
atgaataaagatacgctgatcccgaccaccaaagatctgaaagtgaaaaccaacggcgaaaatatcaacctgaaaaactataaagataacagcagttgctttggcgtgtttgaaaacgttgaaaacgccatctccagcgcggtgcatgcgcaaaaaattctctcgctgcattacaccaaagagcagcgtgaaaaaattatcaccgaaatccgtaaagcggcgctgcaaaacaaagaagtgctggcaaccatgatcctggaagaaacgcatatggggcgttatgaagataaaattctgaaacatgaactggtggcgaaatacacgccgggcactgaagatctgaccaccaccgcctggagcggcgataacggcctgaccgtggtggagatgtcgccttatggcgtgattggcgcgattacgccgtcaaccaacccgaccgaaacggtgatttgtaacagcattggcatgattgccgcgggtaatgcggtggtgtttaacggtcatccctgcgcgaaaaaatgtgtggcgtttgccgttgagatgatcaacaaagcgattatcagctgcggcggcccggaaaatctggtgaccaccatcaaaaatccgaccatggaatcgctggatgccattatcaaacatccttccatcaaactgctgtgcggcaccggcggcccgggcatggtgaaaacgctgctgaacagcggtaaaaaagcgattggcgcgggcgcgggtaacccgccggtgattgtcgatgacaccgccgatattgaaaaagcggggcgtagcattattgaaggctgttcttttgataacaacctgccctgcattgccgaaaaagaagtgtttgtctttgaaaacgtcgccgatgatctgatcagcaatatgctgaaaaacaacgcggtgattatcaatgaagatcaggttagcaaactgatcgatctggtgctgcaaaaaaacaacgaaacgcaggaatattttatcaacaaaaaatgggttggtaaagatgccaaactgtttctcgatgaaatcgatgttgaatcgccgtctaacgtgaaatgtattatctgcgaagtgaacgccaaccatccgtttgtgatgaccgaactgatgatgccgattctgccgattgtgcgcgtgaaagatatcgatgaagcgattaaatatgccaaaattgccgaacaaaaccgtaaacacagcgcctatatttacagcaaaaatatcgataacctgaaccgctttgaacgtgaaatcgataccaccatttttgtgaaaaatgccaaaagttttgccggcgttggttatgaagcggaaggttttaccacctttaccattgccggtagcaccggcgaaggcattaccagcgcccgtaattttacccgccagcgtcgctgcgtgctggcgggctaa

SEQ ID NO: 75 - DNA, 1023 bp, Geobacillus thermoglucosidasius
atgaaagctgcagtagtagagcaatttaaggaaccattaaaaattaaagaagtggaaaagccatctatttcatatggcgaagtattagtccgcattaaagcatgcggtgtatgccatacggacttgcacgccgctcatggcgattggccagtaaaaccaaaacttcctttaatccctggccatgaaggagtcggaattgttgaagaagtcggtccgggggtaacccatttaaaagtgggagaccgcgttggaattccttggttatattctgcgtgcggccattgcgaatattgtttaagcggacaagaagcattatgtgaacatcaacaaaacgccggctactcagtcgacgggggttatgcagaatattgcagagctgcgccagattatgtggtgaaaattcctgacaacttatcgtttgaagaagctgctcctattttctgcgccggagttactacttataaagcgttaaaagtcacaggtacaaaaccgggagaatgggtagcgatctatggcatcggcggccttggacatgttgccgtccagtatgcgaaagcgatggggcttcatgttgttgcagtggatatcggcgatgagaaactggaacttgcaaaagagcttggcgccgatcttgttgtaaatcctgcaaaagaaaatgcggcccaatttatgaaagagaaagtcggcggagtacacgcggctgttgtgacagctgtatctaaacctgcttttcaatctgcgtacaattctatccgcagaggcggcacgtgcgtgcttgtcggattaccgccggaagaaatgcctattccaatctttgatacggtattaaacggaattaaaattatcggttccattgtcggcacgcggaaagacttgcaagaagcgcttcagttcgctgcagaaggtaaagtaaaaaccattattgaagtgcaacctcttgaaaaaattaacgaagtatttgacagaatgctaaaaggagaaattaacggacgggttgttttaacgttagaaaataataattaa

SEQ ID NO: 76 - protein, 340 aa, Geobacillus thermoglucosidasius
MKAAVVEQFKEPLKIKEVEKPSISYGEVLVRIKACGVCHTDLHAAHGDWPVKPKLPLIPGHEGVGIVEEVGPGVTHLKVGDRVGIPWLYSACGHCEYCLSGQEALCEHQQNAGYSVDGGYAEYCRAAPDYVVKIPDNLSFEEAAPIFCAGVTTYKALKVTGTKPGEWVAIYGIGGLGHVAVQYAKAMGLHVVAVDIGDEKLELAKELGADLVVNPAKENAAQFMKEKVGGVHAAVVTAVSKPAFQSAYNSIRRGGTCVLVGLPPEEMPIPIFDTVLNGIKIIGSIVGTRKDLQEALQFAAEGKVKTIIEVQPLEKINEVFDRMLKGEINGRVVLTLENNN

SEQ ID NO: 77 - DNA, 4090 bp, Artificial Sequence
  Description of Artificial Sequence: Synthetic polynucleotide
atggctatcgaaatcaaagtaccggacatcggggctgatgaagttgaaatcaccgagatcctggtcaaagtgggcgacaaagttgaagccgaacagtcgctgatcaccgtagaaggcgacaaagcctctatggaagttccgtctccgcaggcgggtatcgttaaagagatcaaagtctctgttggcgataaaacccagaccggcgcactgattatgattttcgattccgccgacggtgcagcagacgctgcacctgctcaggcagaagagaagaaagaagcagctccggcagcagcaccagcggctgcggcggcaaaagacgttaacgttccggatatcggcagcgacgaagttgaagtgaccgaaatcctggtgaaagttggcgataaagttgaagctgaacagtcgctgatcaccgtagaaggcgacaaggcttctatggaagttccggctccgtttgctggcaccgtgaaagagatcaaagtgaacgtgggtgacaaagtgtctaccggctcgctgattatggtcttcgaagtcgcgggtgaagcaggcgcggcagctccggccgctaaacaggaagcagctccggcagcggcccctgcaccagcggctggcgtgaaagaagttaacgttccggatatcggcggtgacgaagttgaagtgactgaagtgatggtgaaagtgggcgacaaagttgccgctgaacagtcactgatcaccgtagaaggcgacaaagcttctatggaagttccggcgccgtttgcaggcgtcgtgaaggaactgaaagtcaacgttggcgataaagtgaaaactggctcgctgattatgatcttcgaagttgaaggcgcagcgcctgcggcagctcctgcgaaacaggaagcggcagcgccggcaccggcagcaaaagctgaagccccggcagcagcaccagctgcgaaagcggaaggcaaatctgaatttgctgaaaacgacgcttatgttcacgcgactccgctgatccgccgtctggcacgcgagtttggtgttaaccttgcgaaagtgaagggcactggccgtaaaggtcgtatcctgcgcgaagacgttcaggcttacgtgaaagaagctatcaaacgtgcagaagcagctccggcagcgactggcggtggtatccctggcatgctgccgtggccgaaggtggacttcagcaagtttggtgaaatcgaagaagtggaactgggccgcatccagaaaatctctggtgcgaacctgagccgtaactgggtaatgatcccgcatgttactcacttcgacaaaaccgatatcaccgagttggaagcgttccgtaaacagcagaacgaagaagcggcgaaacgtaagctggatgtgaagatcaccccggttgtcttcatcatgaaagccgttgctgcagctcttgagcagatgcctcgcttcaatagttcgctgtcggaagacggtcagcgtctgaccctgaagaaatacatcaacatcggtgtggcggtggataccccgaacggtctggttgttccggtattcaaagacgtcaacaagaaaggcatcatcgagctgtctcgcgagctgatgactatttctaagaaagcgcgtgacggtaagctgactgcgggcgaaatgcagggcggttgcttcaccatctccagcatcggcggcctgggtactacccacttcgcgccgattgtgaacgcgccggaagtggctatcctcggcgtttccaagtccgcgatggagccggtgtggaatggtaaagagttcgtgccgcgtctgatgctgccgatttctctctccttcgaccaccgcgtgatcgacggtgctgatggtgcccgtttcattaccatcattaacaacacgctgtctgacattcgccgtctggtgatgtaagtaaaagagccggcccaacggccggcttttttctggtaatctcatgaatgtattgaggttattagcgaatagacaaatcggttgccgtttgttgtttaaaaattgttaacaattttgtaaaataccgacggatagaacgacccggtggtggttagggtattacttcacataccctatggatttctgggtgcagcaaggtagcaagcgccagaatccccaggagcttacataagtaagtgactggggtgagggcgtgaagctaacgccgctgcggcctgaaagacgacgggtatgaccgccggagataaatatatagaggtcatgatgagtactgaaatcaaaactcaggtcgtggtacttggggcaggccccgcaggttactccgctgccttccgttgcgctgatttaggtctggaaaccgtaatcgtagaacgttacaacacccttggcggtgtttgtctgaacgtgggttgtatcccttctaaagcgctgctgcacgtggcaaaagttatcgaagaagcgaaagcgctggccgaacacggcatcgttttcggcgaaccgaaaactgacattgacaagatccgcacctggaaagaaaaagtcatcactcagctgaccggtggtctggctggcatggccaaaggtcgtaaagtgaaggtggttaacggtctgggtaaatttaccggcgctaacaccctggaagtggaaggcgaaaacggcaaaaccgtgatcaacttcgacaacgccatcatcgcggcgggttcccgtccgattcagctgccgtttatcccgcatgaagatccgcgcgtatgggactccaccgacgcgctggaactgaaatctgtaccgaaacgcatgctggtgatgggcggcggtatcatcggtctggaaatgggtaccgtataccatgcgctgggttcagagattgacgtggtggaaatgttcgaccaggttatcccggctgccgacaaagacgtggtgaaagtcttcaccaaacgcatcagcaagaaatttaacctgatgctggaagccaaagtgactgccgttgaagcgaaagaagacggtatttacgtttccatggaaggtaaaaaagcaccggcggaagcgcagcgttacgacgcagtgctggtcgctatcggccgcgtaccgaatggtaaaaacctcgatgcaggtaaagctggcgtggaagttgacgatcgcggcttcatccgcgttgacaaacaaatgcgcaccaacgtgccgcacatctttgctatcggcgatatcgtcggtcagccgatgctggcgcacaaaggtgtccatgaaggccacgttgccgcagaagttatctccggtctgaaacactacttcgatccgaaagtgatcccatccatcgcctacactaaaccagaagtggcatgggtcggtctgaccgagaaagaagcgaaagagaaaggcatcagctacgaaaccgccaccttcccgtgggctgcttccggccgtgctatcgcttctgactgcgcagatggtatgaccaaactgatcttcgacaaagagacccaccgtgttatcggcggcgcgattgtcggcaccaacggcggcgagctgctgggtgagatcggcctggctatcgagatgggctgtgacgctgaagacatcgccctgaccatccacgctcacccgactctgcacgagtccgttggcctggcggcggaagtgttcgaaggcagcatcaccgacctgccaaacgccaaagcgaagaaaaagtaactttttctttcaggaaaaaagcataagcggctccgggagccgctttttttatgcctgatgtttagaactatgtcactgttcataaaccgctacacctcatacatactttaagggcgaattctgcagatatccatcacactggcggccgctcgagcatgcatctagcacatccggcaattaaaaaagcggctaaccacgccgctttttttacgtctgcaatttacctttccagtcttcttgctccacgttcagagagacgttcgcatactgctgaccgttgctcgttattcagcctgacagtatggttactgtcgtttagacgttgtgggcggctctcctgaactttctcccgaaaaacctgacgttgttcaggtgatgccgattgaacacgctggcgggcgttatcacgttgctgttgattcagtgggcgctgctgtactttttcctt

SEQ ID NO: 78 - protein, 475 aa, Escherichia coli
MMSTEIKTQVVVLGAGPAGYSAAFRCADLGLETVIVERYNTLGGVCLNVGCIPSKALLHVAKVIEEAKALAEHGIVFGEPKTDIDKIRTWKEKVINQLTGGLAGMAKGRKVKVVNGLGKFTGANTLEVEGENGKTVINFDNAIIAAGSRPIQLPFIPHEDPRIWDSTDALELKEVPERLLVMGGGIIGLEMGTVYHALGSQIDVVEMFDQVIPAADKDIVKVFTKRISKKFNLMLETKVTAVEAKEDGIYVTMEGKKAPAEPQRYDAVLVAIGRVPNGKNLDAGKAGVEVDDRGFIRVDKQLRTNVPHIFAIGDIVGQPMLAHKGVHEGHVAAEVIAGKKHYFDPKVIPSIAYTEPEVAWVGLTEKEAKEKGISYETATFPWAASGRAIASDCADGMTKLIFDKESHRVIGGAIVGTNGGELLGEIGLAIEMGCDAEDIALTIHAHPTLHESVGLAAEVFEGSITDLPNPKAKKK

SEQ ID NO: 79 - protein, 475 aa, Klebsiella pneumoniae
MMSTEIKTQVVVLGAGPAGYSAAFRCADLGLETVIVERYSTLGGVCLNVGCIPSKALLHVAKVIEEAKALAEHGIVFGEPKTDIDKIRTWKEKVITQLTGGLAGMAKGRKVKVVNGLGKFTGANTLEVEGENGKTVINFDNAIIAAGSRPIQLPFIPHEDPRVWDSTDALELKSVPKRMLVMGGGIIGLEMGTVYHALGSEIDVVEMFDQVIPAADKDVVKVFTKRISKKFNLMLEAKVTAVEAKEDGIYVSMEGKKAPAEAQRYDAVLVAIGRVPNGKNLDAGKAGVEVDDRGFIRVDKQMRTNVPHIFAIGDIVGQPMLAHKGVHEGHVAAEVISGLKHYFDPKVIPSIAYTKPEVAWVGLTEKEAKEKGISYETATFPWAASGRAIASDCADGMTKLIFDKETHRVIGGAIVGTNGGELLGEIGLAIEMGCDAEDIALTIHAHPTLHESVGLAAEVFEGSITDLPNAKAKKK

SEQ ID NO: 80 - DNA, 347 bp, Artificial Sequence
  Description of Artificial Sequence: Synthetic polynucleotide
ataataatacatatgaaccatgcgagttacgggcctataagccaggcgagatatgatctatatcaatttctcatctataatgctttgttagtatctcgtcgccgacttaataaagagagagttagtgtgaaagctgacaacccttttgatcttttacttcctgctgcaatggccaaagtggccgaagaggcgggtgtctataaagcaacgaaacatccgcttaagactttctatctggcgattaccgccggtgttttcatctcaatcgcattcaccactggcacaggcacagaaggtaggtgttacatgtcagaacgtttacacaatgacgtggatcctattattat

SEQ ID NO: 81 - DNA, 4678 bp, Artificial Sequence
  Description of Artificial Sequence: Synthetic polynucleotide
aagaggtaaaagaataatggctatcgaaatcaaagtaccggacatcggggctgatgaagttgaaatcaccgagatcctggtcaaagtgggcgacaaagttgaagccgaacagtcgctgatcaccgtagaaggcgacaaagcctctatggaagttccgtctccgcaggcgggtatcgttaaagagatcaaagtctctgttggcgataaaacccagaccggcgcactgattatgattttcgattccgccgacggtgcagcagacgctgcacctgctcaggcagaagagaagaaagaagcagctccggcagcagcaccagcggctgcggcggcaaaagacgttaacgttccggatatcggcagcgacgaagttgaagtgaccgaaatcctggtgaaagttggcgataaagttgaagctgaacagtcgctgatcaccgtagaaggcgacaaggcttctatggaagttccggctccgtttgctggcaccgtgaaagagatcaaagtgaacgtgggtgacaaagtgtctaccggctcgctgattatggtcttcgaagtcgcgggtgaagcaggcgcggcagctccggccgctaaacaggaagcagctccggcagcggcccctgcaccagcggctggcgtgaaagaagttaacgttccggatatcggcggtgacgaagttgaagtgactgaagtgatggtgaaagtgggcgacaaagttgccgctgaacagtcactgatcaccgtagaaggcgacaaagcttctatggaagttccggcgccgtttgcaggcgtcgtgaaggaactgaaagtcaacgttggcgataaagtgaaaactggctcgctgattatgatcttcgaagttgaaggcgcagcgcctgcggcagctcctgcgaaacaggaagcggcagcgccggcaccggcagcaaaagctgaagccccggcagcagcaccagctgcgaaagcggaaggcaaatctgaatttgctgaaaacgacgcttatgttcacgcgactccgctgatccgccgtctggcacgcgagtttggtgttaaccttgcgaaagtgaagggcactggccgtaaaggtcgtatcctgcgcgaagacgttcaggcttacgtgaaagaagctatcaaacgtgcagaagcagctccggcagcgactggcggtggtatccctggcatgctgccgtggccgaaggtggacttcagcaagtttggtgaaatcgaagaagtggaactgggccgcatccagaaaatctctggtgcgaacctgagccgtaactgggtaatgatcccgcatgttactcacttcgacaaaaccgatatcaccgagttggaagcgttccgtaaacagcagaacgaagaagcggcgaaacgtaagctggatgtgaagatcaccccggttgtcttcatcatgaaagccgttgctgcagctcttgagcagatgcctcgcttcaatagttcgctgtcggaagacggtcagcgtctgaccctgaagaaatacatcaacatcggtgtggcggtggataccccgaacggtctggttgttccggtattcaaagacgtcaacaagaaaggcatcatcgagctgtctcgcgagctgatgactatttctaagaaagcgcgtgacggtaagctgactgcgggcgaaatgcagggcggttgcttcaccatctccagcatcggcggcctgggtactacccacttcgcgccgattgtgaacgcgccggaagtggctatcctcggcgtttccaagtccgcgatggagccggtgtggaatggtaaagagttcgtgccgcgtctgatgctgccgatttctctctccttcgaccaccgcgtgatcgacggtgctgatggtgcccgtttcattaccatcattaacaacacgctgtctgacattcgccgtctggtgatgtaagtaaaagagccggcccaacggccggcttttttctggtaatctcatgaatgtattgaggttattagcgaatagacaaatcggttgccgtttgttaagccaggcgagatatgatctatatcaatttctcatctataatgctttgttagtatctcgtcgccgacttaataaagagagagttagtcttctatatcacagcaagaaggtaggtgttacatgatgagtactgaaatcaaaactcaggtcgtggtacttggggcaggccccgcaggttactctgcagccttccgttgcgctgatttaggtctggaaaccgtcatcgtagaacgttacagcaccctcggtggtgtttgtctgaacgtgggttgtatcccttctaaagcgctgctgcacgtggcaaaagttatcgaagaagcgaaagcgctggccgaacacggcatcgttttcggcgaaccgaaaactgacattgacaagatccgcacctggaaagaaaaagtcatcactcagctgaccggtggtctggctggcatggccaaaggtcgtaaagtgaaggtggttaacggtctgggtaaatttaccggcgctaacaccctggaagtggaaggcgaaaacggcaaaaccgtgatcaacttcgacaacgccatcatcgcggcgggttcccgtccgattcagctgccgtttatcccgcatgaagatccgcgcgtatgggactccaccgacgcgctggaactgaaatctgtaccgaaacgcatgctggtgatgggcggcggtatcatcggtctggaaatgggtaccgtataccatgcgctgggttcagagattgacgtggtggaaatgttcgaccaggttatcccggctgccgacaaagacgtggtgaaagtcttcaccaaacgcatcagcaagaaatttaacctgatgctggaagccaaagtgactgccgttgaagcgaaagaagacggtatttacgtttccatggaaggtaaaaaagcaccggcggaagcgcagcgttacgacgcagtgctggtcgctatcggccgcgtaccgaatggtaaaaacctcgatgcaggtaaagctggcgtggaagttgacgatcgcggcttcatccgcgttgacaaacaaatgcgcaccaacgtgccgcacatctttgctatcggcgatatcgtcggtcagccgatgctggcgcacaaaggtgtccatgaaggccacgttgccgcagaagttatctccggtctgaaacactacttcgatccgaaagtgatcccatccatcgcctacactaaaccagaagtggcatgggtcggtctgaccgagaaagaagcgaaagagaaaggcatcagctacgaaaccgccaccttcccgtgggctgcttccggccgtgctatcgcttctgactgcgcagatggtatgaccaaactgatcttcgacaaagagacccaccgtgttatcggcggcgcgattgtcggcaccaacggcggcgagctgctgggtgagatcggcctggctatcgagatgggctgtgacgctgaagacatcgccctgaccatccacgctcacccgactctgcacgagtccgttggcctggcggcggaagtgttcgaaggcagcatcaccgacctgccaaacgccaaagcgaagaaaaagtaactttttctttcaggaaaaaagcataagcggctccgggagccgctttttttatgcctgatgtttagaactatgtcactgttcataaaccgctacacctcatacatactttaagggcgaattctgcagatatccatcacactggcggccgctcgagcatgcatctagcacatccggcaattaaaaaagcggctaaccacgccgctttttttacgtctgcaatttacctttccagtcttcttgctccacgttcagagagacgttcgcatactgctgaccgttgctcgttattcagcctgacagtatggttactgtcgtttagacgttgtgggcggctctcctgaactttctcccgaaaaacctgacgttgttcaggtgatgccgattgaacacgctggcgggcgttatcacgttgctgttgattcagtgggcgctgctgtactttttccttaaacacctggcgctgctctggtgatgcggactgaatacgctcacgcgctgcgtctcttcgctgctggttctgcgggttagtctgcattttctcgcgaaccgcctggcgctgctcaggcgaggcggactgaatgcgctcacgcgctgcctctcttcgctgctggatcttcgggttagtctgcattctctcgcgaactgcctggcgctgctcaggcgaggcggactgataacgctgacgagcggcgtccttttgttgctgggtcagtggttggcgacggctgaagtcgtggaagtcgtcatagctcccatagtgttcagcttcattaaaccgctgtgccgctgcctgacgttgggtacctcgtgtaatgactggtgcggcgtgtgttcgttgctgaaactgatttgctgccgcctgacgctggctgtcgcgcgttggggcaggtaattgcgtggcgctcattccgccgttgacatcggtttgatgaaaccgctttgccatatcctgatcatgatagggcacaccattacggtagtttggattgtgccgccatgccatattcttatcagtaagatgctcaccggtgatacggttgaaattgttgacgtcgatattgatgttgtcgccgttgtgttgccagccattaccgtcacgatgaccgccatcgtggtgatgataatcat

SEQ ID NO: 82 - DNA, 1114 bp, Artificial Sequence
  Description of Artificial Sequence: Synthetic polynucleotide
  CDS (323)..(958)
caaaaaaccggagtctgtgctccggttttttattatccgctaatcaattacatatgaatatcctccttagttcctattccgaagttcctattctctagaaagtataggaacttcggcgcgcctacctgtgacggaagatcacttcgcagaataaataaatcctggtgtccctgttgataccgggaagccctgggccaacttttggcgaaaatgagacgttgatcggcacgtaagaggttccaactttcaccataatgaaataagatcactaccgggcgtattttttgagttgtcgagattttcaggagctaaggaagctaaaatggagaaaaaaatcactggatataccaccgttgatatatcccaatggcatcgtaaagaacattttgaggcatttcagtcagttgctcaatgtacctataaccagaccgttcagctggatattacggcctttttaaagaccgtaaagaaaaataagcacaagttttatccggcctttattcacattcttgcccgcctgatgaatgctcatccggaattacgtatggcaatgaaagacggtgagctggtgatatgggatagtgttcacccttgttacaccgttttccatgagcaaactgaaacgttttcatcgctctggagtgaataccacgacgatttccggcagtttctacacatatattcgcaagatgtggcgtgttacggtgaaaacctggcctatttccctaaagggtttattgagaatatgtttttcgtctcagccaatccctgggtgagtttcaccagttttgatttaaacgtggccaatatggacaacttcttcgcccccgttttcaccatgggcaaatattatacgcaaggcgacaaggtgctgatgccgctggcgattcaggttcatcatgccgtttgtgatggcttccatgtcggcagatgcttaatgaatacaacagtactgcgatgagtggcagggcggggcgtaaggcgcgccatttaaatgaagttcctattccgaagttcctattctctagaaagtataggaacttcgaagcagctccagcctacacccttcttcagggctgactgtttgcataaaaattcatctgtatgcacaata

SEQ ID NO: 83 - protein, 212 aa, Artificial Sequence
  Description of Artificial Sequence: Synthetic polypeptide
MEKKITGYTTVDISQWHRKEHFEAFQSVAQCTYNQTVQLDITAFLKTVKKNKHKFYPAFIHILARLMNAHPELRMAMKDGELVIWDSVHPCYTVFHEQTETFSSLWSEYHDDFRQFLHIYSQDVACYGENLAYFPKGFIENMFFVSANPWVSFTSFDLNVANMDNFFAPVFTMGKYYTQGDKVLMPLAIQVHHAVCDGFHVGRCLMNTTVLR

SEQ ID NO: 84 - DNA, 2521 bp, Artificial Sequence
  Description of Artificial Sequence: Synthetic polynucleotide
ttatttggtgatattggtaccaatatcatgcagcaaacggtgcaacattgccgtgtctcgttgctctaaaagccccaggcgttgttgtaaccagtcgaccagttttatgtcatctgccactgccagagtcgtcagcaatgtcatggctcgttcgcgtaaagcttgcagttgatgttggtctgccgttgcatcacttttcgccggttgttgtattaatgttgctaattgatagcaatagaccatcaccgcctgccccagattgagcgaaggataatccgccaccatcggcacaccagtaagaacgtcagccaacgctaactcttcgttagtcaacccggaatcttcgcgaccaaacaccagcgcggcatggctcatccatgaagatttttcctctaacagcggcaccagttcaactggcgtggcgtagtaatgatatttcgcccgactgcgcgcagtggtggcgacagtgaaatcgacatcgtgtaacgattcagccaatgtcgggaaaactttaatattatcaataatatcaccagatccatgtgcgacccagcgggtggctggctccaggtgtgcctgactatcgacaatccgcagatcgctaaaccccatcgttttcattgcccgcgccgctgccccaatattttctgctctggcgggtgcgaccagaataatcgttatacgcatattgccactcttcttgatcaaataaccgcgaaccgggtgatcactgtcaacttattacgcggtgcgaatttacaaattcttaacgtaagtcgcagaaaaagccctttacttagcttaaaaaaggctaaactatttcctgactgtactaacggttgagttgttaaaaaatgctacatatccttctgtttacttaggataattttataaaaaataaatctcgacaattggattcaccacgtttattagttgtatgatgcaactagttggattattaaaataatgtgacgaaagctagcatttagatacgatgatttcatcaaactgttaacgtgctacaattgaacttgatatatgtcaacgaagcgtagttttattgggtgtccggcccctcttagcctgttatgttgctgttaaaatggttaggatgacagccgtttttgacactgtcgggtcctgagggaaagtacccacgaccaagctaatgatgttgttgacgttgatggaaagtgcatcaagaacgcaattacgtactttagtcatgttacgccgatcatgttaatttgcagcatgcatcaggcaggtcagggacttttgtacttcctgtttcgatttagttggcaatttaggtagcaaacgaattcatcggctttaccaccgtcaaaaaaaacggcgctttttagcgccgtttttatttttcaaccttatttccagatacgtaactcatcgtccgttgtaacttctttactggctttcattttcggcagtgaaaacgcataccagtcgatattacgggtcacaaacatcatgccggccagcgccaccaccagcacactggttcccaacaacagcgcgctatcggcagagttgagcagtccccacatcacaccatccagcaacaacagcgcgagggtaaacaacatgctgttgcaccaacctttcaataccgcttgcaaataaataccgttcattatcgccccaatcagactggcgattatccatgccacggtaaaaccggtatgttcagaaagcgccagcaagagcaaataaaacatcaccaatgaaagccccaccagcaaatattgcattgggtgtaaacgttgcgcggtgagcgtttcaaaaacaaagaacgccataaaagtcagtgcaatcagcagaatggcgtacttagtcgcccggtcagttaattggtattgatcggctggcgtcgttactgcgacgctaaacgccgggaagttttcccagccggtatcattgcctgaagcaaaacgctcaccgagattattagcaaaccagctgctttgccagtgcgcctgaaaacctgactcgctaacttcccgtttggctggtagaaaatcacctaaaaaactgggatgcggccagttgctggttaaggtcatttcgctattacgcccgccaggcaccacagaaagatcgccggtaccgcttaaattcagggccatattcagcttcaggttctgcttccgccagtccccttcaggtaaagggatatgcacgccctgcccgccttgctctaacccggtgccgggttcaatggtcagcgccgttccgttaacttcaggcgctttcaccacaccaataccacgcgcatccccgacgctaatcacaataaatggcttgcctaaggtgatatttggcgcgttgagttcgctaagacgcgaaacatcgaaatcggcttttaacgttaaatcactgtgccagacctgaccggtataaatccctatcttgcgttcttccacgttctgattgccatcaaccatcaatgactcaggtaaccaaaaatggataaaacttcgtttccgctgcagggttttat

SEQ ID NO: 85 - DNA, 3010 bp, Artificial Sequence
  Description of Artificial Sequence: Synthetic polynucleotide
aagccacagcaggatgcccactgcaacaaaggtgatcacaccggaaacgcgatggagaatggacgctatcgccgtgatggggaaccggatggtctgtaggtccagattaacaggtctttgttttttcacatttcttatcatgaataacgcccacatgctgttcttattattccctggggactacgggcacagaggttaactttctgttacctggagacgtcgggatttccttcctccggtctgcttgcgggtcagacagcgtcctttctataactgcgcgtcatgcaaaacactgcttccagatgcgaaaacgacacgttacaacgctgggtggctcgggattgcagggtgttccggagacctggcggcagtataggctgttcacaaaatcattacaattaacctacatatagtttgtcgggttttatcctgaacagtgatccaggtcacgataacaacatttatttaatttttaatcatctaatttgacaatcattcaacaaagttgttacaaacattaccaggaaaagcatataatgcgtaaaagttatgaagtcggtatttcacctaagattaacttatgtaacagtgtggaagtattgaccaattcattcgggacagttattagtggtagacaagtttaataattcggattgctaagtacttgattcgccatttattcgtcatcaatggatcctttacctgcaagcgcccagagctctgtacccaggttttcccctctttcacagagcggcgagccaaataaaaaacgggtaaagccaggttgatgtgcgaaggcaaatttaagttccggcagtcttacgcaataaggcgctaaggagaccttaaatggctgatacaaaagcaaaactcaccctcaacggggatacagctgttgaactggatgtgctgaaaggcacgctgggtcaagatgttattgatatccgtactctcggttcaaaaggtgtgttcacctttgacccaggcttcacttcaaccgcatcctgcgaatctaaaattacttttattgatggtgatgaaggtattttgctgcaccgcggtttcccgatcgatcagctggcgaccgattctaactacctggaagtttgttacatcctgctgaatggtgaaaaaccgactcaggaacagtatgacgaatttaaaactacggtgacccgtcataccatgatccacgagcagattacccgtctgttccatgctttccgtcgcgactcgcatccaatggcagtcatgtgtggtattaccggcgcgctggcggcgttctatcacgactcgctggatgttaacaatcctcgtcaccgtgaaattgccgcgttcctcctgctgtcgaaaatgccgaccatggccgcgatgtgttacaagtattccattggtcagccatttgtttacccgcgcaacgatctctcctacgccggtaacttcctgaatatgatgttctccacgccgtgcgaaccgtatgaagttaatccgattctggaacgtgctatggaccgtattctgatcctgcacgctgaccatgaacagaacgcctctacctccaccgtgcgtaccgctggctcttcgggtgcgaacccgtttgcctgtatcgcagcaggtattgcttcactgtggggacctgcgcacggcggtgctaacgaagcggcgctgaaaatgctggaagaaatcagctccgttaaacacattccggaatttgttcgtcgtgcgaaagacaaaaatgattctttccgcctgatgggcttcggtcaccgcgtgtacaaaaattacgacccgcgcgccaccgtaatgcgtgaaacctgccatgaagtgctgaaagagctgggcacgaaggatgacctgctggaagtggctatggagctggaaaacatcgcgctgaacgacccgtactttatcgagaagaaactgtacccgaacgtcgatttctactctggtatcatcctgaaagcgatgggtattccgtcttccatgttcaccgtcattttcgcaatggcacgtaccgttggctggatcgcccactggagcgaaatgcacagtgacggtatgaagattgcccgtccgcgtcagctgtatacaggatatgaaaaacgcgactttaaaagcgatatcaagcgttaatggttgattgctaagttgtaaatattttaacccgccgttcatatggcgggttgatttttatatgcctaaacacaaaaaattgtaaaaataaaatccattaacagacctatatagatatttaaaaagaatagaacagctcaaattatcagcaacccaatactttcaattaaaaacttcatggtagtcgcatttataaccctatgaaaatgacgtctatctatacccccctatattttattcatcatacaacaaattcatgataccaataatttagttttgcatttaataaaactaacaatatttttaagcaaaactaaaaactagcaataatcaaatacgatattctggcgtagctatacccctattctatatccttaaaggactctgttatgtttaaaggacaaaaaacattggccgcactggccgtatctctgctgttcactgcacctgtttatgctgctgatgaaggttctggcgaaattcactttaagggggaggttattgaagcaccttgtgaaattcatccagaagatattgataaaaacatagatcttggacaagtcacgacaacccatataaaccgggagcatcatagcaataaagtggccgtcgacattcgcttgatcaactgtgatctgcctgcttctgacaacggtagcggaatgccggtatccaaagttggcgtaaccttcgatagcacggctaagacaactggtgctacgcctttgttgagcaacaccagtgcaggcgaagcaactggggtcggtgtacgactgatggacaaaaatgacggtaacatcgtattaggttcagccgcgccagatcttgacctggatgcaagctcatcagaacagacgctgaactttttcgcctggat

SEQ ID NO: 86 - DNA, 4180 bp, Artificial Sequence
  Description of Artificial Sequence: Synthetic polynucleotide
cgcgatgtcgacgtcacgaaactgaaaaaaccgctctacattctggcgactgctgatgaagaaaccagtatggccggagcgcgttattttgccgaaactaccgccctgcgcccggattgcgccatcattggcgaaccgacgtcactacaaccggtacgcgcacataaaggtcatatctctaacgccatccgtattcagggccagtcggggcactccagcgatccagcacgcggagttaacgctatcgaactaatgcacgacgccatcgggcatattttgcaattgcgcgataacctgaaagaacgttatcactacgaagcgtttaccgtgccataccctacgctcaacctcgggcatattcacggtggcgacgcttctaaccgtatttgcgcttgctgtgagttgcatatggatattcgtccgctgcctggcatgacactcaatgaacttaatggtttgctcaacgatgcattggctccggtgagcgaacgctggccgggtcgtctgacggtcgacgagctgcatccgccgatccctggctatgaatgcccaccgaatcatcaactggttgaagtggttgagaaattgctcggagcaaaaaccgaagtggtgaactactgtaccgaagcgccgtttattcaaacgttatgcccgacgctggtgttggggcctggctcaattaatcaggctcatcaacctgatgaatatctggaaacacggtttatcaagcccacccgcgaactgataacccaggtaattcaccatttttgctggcattaaaacgtaggccggataaggcgctcgcgccgcatccggcgctgttgccaaactccagtgccgcaataatgtcggatgcgatgcttgcgcatcttatccgacctacagtgactcaaacgatgcccaaccgtaggccggataaggcgctcgcgccgcatccggcactgttgccaaactccagtgccgcaataatgtcggatgcgatacttgcgcatcttatccgaccgacagtgactcaaacgatgcccaactgtaggccggataaggcgctcgcgccgcatccggcactgttgccaaactccagtgccgcaataatgtcggatgcgatacttgcgcatcttatccgacctacacctttggtgttacttggggcgattttttaacatttccataagttacgcttatttaaagcgtcgtgaatttaatgacgtaaattcctgctatttattcgtttgctgaagcgatttcgcagcatttgacgtcaccgcttttacgtggctttataaaagacgacgaaaagcaaagcccgagcatattcgcgccaatgctagcaagaggagaagtcgacatgacagacttaaataaagtggtaaaagaacttgaagctcttggtatttatgacgtaaaagaagttgtttacaatccaagctacgagcaattgttcgaagaagaaactaaaccaggtttagaaggctttgaaaaaggtactttaactacgactggtgcagtggcagtagatacaggtatcttcacaggtcgttctccaaaagataaatatatcgtgttagatgaaaaaaccaaagatactgtttggtggacatctgaaacagcaaaaaacgacaacaagccaatgaaccaagctacatggcaaagcttaaaagacttggtaaccaaccagctttctcgtaaacgcttatttgtagttgatggtttctgtggtgcgagcgaacacgaccgtattgcagtacgtattgtcactgaagtagcgtggcaagcacattttgtaaaaaatatgtttattcgcccaactgaagaacaactcaaaaattttgaaccagatttcgttgtaatgaatggttctaaagtaaccaatccaaactggaaagaacaaggtttaaattcagaaaactttgttgctttcaacttgactgaacgcattcaattaatcggtggtacttggtacggcggtgaaatgaaaaaaggtatgttctcaatcatgaactacttcctaccacttaaaggtgttggtgcaatgcactgctcagctaacgttggtaaagatggcgatgtagcaatcttcttcggcttatctggcacaggtaaaacaaccctttcaacggatccaaaacgtgaattaatcggtgacgatgaacacggctgggatgatgtgggtatctttaactttgaaggtggttgctatgcgaaaaccattcacctttcagaagaaaatgaaccagatatttaccgcgctatccgtcgcgacgcattattagaaaacgtggttgttcgtgcagatggttctgttgatttcgatgatggttcaaaaacagaaaatactcgcgtgtcttacccaatttatcacattgataacattgtaaaaccagtttctcgtgcaggtcacgcaactaaagtgattttcttaactgcagatgcatttggcgtattaccaccagtatctaaattgacaccagaacaaactaaatactacttcttatctggtttcacagcaaaattagcaggtactgaacgtggtattactgaaccaactccaactttctcagcatgtttcggtgctgcgttcttaacccttcacccaactcaatatgcagaagtgttagtaaaacgtatgcaagcagtgggtgctgaagcttacttagtaaatactggttggaatggcacaggcaaacgtatctcaatcaaagatactcgcggaatcattgatgcaatcttagatggctcaattgaaaaagctgaaatgggcgaattaccaatctttaacttagccattcctaaagcattaccaggtgtagattctgcaatcttagatcctcgcgatacttacgcagataaagcacaatggcaatcaaaagctgaagacttagcaggtcgttttgtgaaaaactttgttaaatatgcaactaacgaagaaggcaaagctttaattgcagctggtcctaaagcttaatctagaaagcttcctagaggcatcaaataaaacgaaaggctcagtcgaaagactgggcctttcgttttatctgttgtttgtcggtgaacgctctcctgagtaggacgaattcacttctgttctaacaccctcgttttcaatatatttctgtctgcattttattcaaattctgaatataccttcagatatccttaaggaattgtcgttacattcggcgatattttttcaagacaggttcttactatgcattccacagaagtccaggctaaacctctttttagctggaaagccctgggttgggcactgctctacttttggtttttctctactctgctacaggccattatttacatcagtggttatagtggcactaacggcattcgcgactcgctgttattcagttcgctgtggttgatcccggtattcctctttccgaagcggattaaaattattgccgcagtaatcggcgtggtgctatgggcggcctctctggcggcgctgtgctactacgtcatctacggtcaggagttctcgcagagcgttctgtttgtgatgttcgaaaccaacaccaacgaagccagcgagtatttaagccagtatttcagcctgaaaattgtgcttatcgcgctggcctatacggcggtggcagttctgctgtggacacgcctgcgcccggtctatattccaaagccgtggcgttatgttgtctcttttgccctgctttatggcttgattctgcatccgatcgccatgaatacgtttatcaaaaacaagccgtttgagaaaacgttggataacctggcctcgcgtatggagcctgccgcaccgtggcaattcctgaccggctattatcagtatcgtcagcaactaaactcgctaacaaagttactgaatgaaaataatgccttgccgccactggctaatttcaaagatgaatcgggtaacgaaccgcgcactttagtgctggtgattggcgagtcgacccagcgcggacgcatgagtctgtacggttatccgcgtgaaaccacgccggagctggatgcgctgcataaaaccgatccgaatctgaccgtgtttaataacgtagttacgtctcgtccgtacaccattgaaatcctgcaacaggcgctgacctttgccaatgaaaagaacccggatctgtatctgacgcagccgtcgctgatgaacatgatgaaacaggcgggttataaaaccttc

SEQ ID NO: 87 - DNA, 4960 bp, Artificial Sequence
  Description of Artificial Sequence: Synthetic polynucleotide
aataggcgtatcacgaggccctttcgtcttcacctcgagaattgtgagcggataacaattgacattgtgagcggataacaagatactgagcacatcagcaggacgcactgaccgaattcaattaagctagcaagaggagaagtcgagatgaacttacatgaatatcaggcaaaacaactttttgcccgctatggcttaccagcaccggtgggttatgcctgtactactccgcgcgaagcagaagaagccgcttcaaaaatcggtgccggtccgtgggtagtgaaatgtcaggttcacgctggtggccgcggtaaagcgggcggtgtgaaagttgtaaacagcaaagaagacatccgtgcttttgcagaaaactggctgggcaagcgtctggtaacgtatcaaacagatgccaatggccaaccggttaaccagattctggttgaagcagcgaccgatatcgctaaagagctgtatctcggtgccgttgttgaccgtagttcccgtcgtgtggtctttatggcctccaccgaaggcggcgtggaaatcgaaaaagtggcggaagaaactccgcacctgatccataaagttgcgcttgatccgctgactggcccgatgccgtatcagggacgcgagctggcgttcaaactgggtctggaaggtaaactggttcagcagttcaccaaaatcttcatgggcctggcgaccattttcctggagcgcgacctggcgttgatcgaaatcaacccgctggtcatcaccaaacagggcgatctgatttgcctcgacggcaaactgggcgctgacggcaacgcactgttccgccagcctgatctgcgcgaaatgcgtgaccagtcgcaggaagatccgcgtgaagcacaggctgcacagtgggaactgaactacgttgcgctggacggtaacatcggttgtatggttaacggcgcaggtctggcgatgggtacgatggacatcgttaaactgcacggcggcgaaccggctaacttccttgacgttggcggcggcgcaaccaaagaacgtgtaaccgaagcgttcaaaatcatcctctctgacgacaaagtgaaagccgttctggttaacatcttcggcggtatcgttcgttgcgacctgatcgctgacggtatcatcggcgcggtagcagaagtgggtgttaacgtaccggtcgtggtacgtctggaaggtaacaacgccgaactcggcgcgaagaaactggctgacagcggcctgaatattattgcagcaaaaggtctgacggatgcagctcagcaggttgttgccgcagtggaggggaaataatgtccattttaatcgataaaaacaccaaggttatctgccagggctttaccggtagccaggggactttccactcagaacaggccattgcatacggcactaaaatggttggcggcgtaaccccaggtaaaggcggcaccacccacctcggcctgccggtgttcaacaccgtgcgtgaagccgttgctgccactggcgctaccgcttctgttatctacgtaccagcaccgttctgcaaagactccattctggaagccatcgacgcaggcatcaaactgattatcaccatcactgaaggcatcccgacgctggatatgctgaccgtgaaagtgaagctggatgaagcaggcgttcgtatgatcggcccgaactgcccaggcgttatcactccgggtgaatgcaaaatcggtatccagcctggtcacattcacaaaccgggtaaagtgggtatcgtttcccgttccggtacactgacctatgaagcggttaaacagaccacggattacggtttcggtcagtcgacctgtgtcggtatcggcggtgacccgatcccgggctctaactttatcgacattctcgaaatgttcgaaaaagatccgcagaccgaagcgatcgtgatgatcggtgagatcggcggtagcgctgaagaagaagcagctgcgtacatcaaagagcacgttaccaagccagttgtgggttacatcgctggtgtgactgcgccgaaaggcaaacgtatgggccacgcgggtgccatcattgccggtgggaaagggactgcggatgagaaattcgctgctctggaagccgcaggcgtgaaaaccgttcgcagcctggcggatatcggtgaagcactgaaaactgttctgaaataatctagcaagaggagaagtcgacatggaaatcaaagaaatggtgagccttgcacgcaaggctcagaaggagtatcaagctacccataaccaagaagcagttgacaacatttgccgagctgcagcaaaagttatttatgaaaatgcagctattctggctcgcgaagcagtagacgaaaccggcatgggcgtttacgaacacaaagtggccaagaatcaaggcaaatccaaaggtgtttggtacaacctccacaataaaaaatcgattggtatcctcaatatagacgagcgtaccggtatgatcgagattgcaaagcctatcggagttgtaggagccgtaacgccgacgaccaacccgatcgttactccgatgagcaatatcatctttgctcttaagacctgcaatgccatcattattgccccccaccccagatccaaaaaatgctctgcacacgcagttcgtctgatcaaagaagctatcgctccgttcaacgtaccggaaggtatggttcagatcatcgaagaacccagcatcgagaagacgcaggaactcatgggcgccgtagacgtagtagttgctacgggtggtatgggcatggtgaagtctgcatattcttcaggaaagccttctttcggtgttggagccggtaacgttcaggtgatcgtggatagcaacatcgatttcgaagctgctgcagaaaaaatcatcaccggtcgtgctttcgacaacggtatcatctgctcaggcgaacagagcatcatctacaacgaggctgacaaggaagcagttttcacagcattccgcaaccacggtgcatatttctgtgacgaagccgaaggagatcgggctcgtgcagctatcttcgaaaatggagccatcgcgaaagatgtagtaggtcagagcgttgccttcattgccaagaaagcaaacatcaatatccccgagggtacccgtattctcgttgttgaagctcgcggcgtaggagcagaagacgttatctgtaaggaaaagatgtgtcccgtaatgtgcgccctcagctacaagcacttcgaagaaggtgtagaaatcgcacgtacgaacctcgccaacgaaggtaacggccacacctgtgctatccactccaacaatcaggcacacatcatcctcgcaggatcagagctgacggtatctcgtatcgtagtgaatgctccgagtgccactacagcaggcggtcacatccaaaacggtcttgccgtaaccaatacgctcggatgcggatcatggggtaataactctatctccgagaacttcacttacaagcacctcctcaacatttcacgcatcgcaccgttgaattcaagcattcacatccccgatgacaaagaaatctgggaactctaatctagcaagaggagaagtcgacatgcaacttttcaaactcaagagtgtaacacatcactttgacacttttgcagaatttgccaaggaattctgtcttggagaacgcgacttggtaattaccaacgagttcatctatgaaccgtatatgaaggcatgccagctcccctgccattttgttatgcaggagaaatatgggcaaggcgagccttctgacgaaatgatgaataacatcttggcagacatccgtaatatccagttcgaccgcgtaatcggtatcggaggaggtacggttattgacatctctaaacttttcgttctgaaaggattaaatgatgtactcgatgcattcgaccgcaaaatacctcttatcaaagagaaagaactgatcattgtgcccacaacatgcggaacgggtagcgaggtgacgaacatttctatcgcagaaatcaaaagccgtcacaccaaaatgggattggctgacgatgccattgttgcagaccatgccatcatcatacctgaacttctgaagagcttgcctttccacttctacgcatgcagtgcaatcgatgctcttatccatgccatcgagtcatacgtatctcctaaagccagtccatattctcgtctgttcagtgaggcggcttgggacattatcctggaagtattcaagaaaatcgccgaacacggccctgaataccgcttcgaaaagctgggagaaatgatcatggccagcaactatgccggtatagccttcggaaatgcaggagtaggagccgtccacgcactatcctacccgttgggaggcaactatcacgtgccgcatggagaagcaaactatcagttcttcacagaggtattcaaagtataccaaaagaagaatcctttcggctatatagtcgaactcaactggaagctctccaagatactgaactgccagcccgaatacgtatatccgaagctggatgaacttctcggatgccttcttaccaagaaacctttgcacgaatacggcatgaaggacgaagaggtaagaggctttgcggaatcagtgcttaagacacagcaaagattgctcgccaacaactacgtagagcttactgtagatgagatcgaaggtatctacagaagactctactaatctagaaagcttcctagaggcatcaaataaaacgaaaggctcagtcgaaagactgggcctttcgttttatctgttgtttgtcggtgaacgctctcctgagtaggacaaatccgccgccctagacctaggcgttcggctgcgacacgtcttgagcgattgtgtaggctggagctgcttcgaagttcctatactttctagagaataggaacttcggaataggaactaaggaggatattcatatggaccatggctaattcccat

SEQ ID NO: 88 - DNA, 5083 bp, Artificial Sequence
  Description of Artificial Sequence: Synthetic polynucleotide
tcgagaaatttatcaaaaagagtgttgacttgtgagcggataacaatgatacttagattcaattgtgagcggataacaatttcacacagaattcaattaagctagcaagaggagaagtcgacatggccaacataagttcaccattcgggcaaaacgaatggctggttgaagagatgtaccgcaagttccgcgacgacccctcctcggtcgatcccagctggcacgagttcctggttgactacagccccgaacccacctcccaaccagctgccgaaccaacccgggttacctcgccactcgttgccgagcgggccgctgcggccgccccgcaggcaccccccaagccggccgacaccgcggccgcgggcaacggcgtggtcgccgcactggccgccaaaactgccgttcccccgccagccgaaggtgacgaggtagcggtgctgcgcggcgccgccgcggccgtcgtcaagaacatgtccgcgtcgttggaggtgccgacggcgaccagcgtccgggcggtcccggccaagctactgatcgacaaccggatcgtcatcaacaaccagttgaagcggacccgcggcggcaagatctcgttcacgcatttgctgggctacgccctggtgcaggcggtgaagaaattcccgaacatgaaccggcactacaccgaagtcgacggcaagcccaccgcggtcacgccggcgcacaccaatctcggcctggcgatcgacctgcaaggcaaggacgggaagcgttccctggtggtggccggcatcaagcggtgcgagaccatgcgattcgcgcagttcgtcacggcctacgaagacatcgtacgccgggcccgcgacggcaagctgaccactgaagactttgccggcgtgacgatttcgctgaccaatcccggaaccatcggcaccgtgcattcggtgccgcggctgatgcccggccagggcgccatcatcggcgtgggcgccatggaataccccgccgagtttcaaggcgccagcgaggaacgcatcgccgagctgggcatcggcaaattgatcactttgacctccacctacgaccaccgcatcatccagggcgcggaatcgggcgacttcctgcgcaccatccacgagttgctgctctcggatggcttctgggacgaggtcttccgcgaactgagcatcccatatctgccggtgcgctggagcaccgacaaccccgactcgatcgtcgacaagaacgctcgcgtcatgaacttgatcgcggcctaccgcaaccgcggccatctgatggccgataccgacccgctgcggttggacaaagctcggttccgcagtcaccccgacctcgaagtgctgacccacggcctgacgctgtgggatctcgatcgggtgttcaaggtcgacggctttgccggtgcgcagtacaagaaactgcgcgacgtgctgggcttgctgcgcgatgcctactgccgccacatcggcgtggagtacgcccatatcctcgaccccgaacaaaaggagtggctcgaacaacgggtcgagaccaagcacgtcaaacccactgtggcccaacagaaatacatcctcagcaagctcaacgccgccgaggcctttgaaacgttcctacagaccaagtacgtcggccagaagcggttctcgctggaaggcgccgaaagcgtgatcccgatgatggacgcggcgatcgaccagtgcgctgagcacggcctcgacgaggtggtcatcgggatgccgcaccggggccggctcaacgtgctggccaacatcgtcggcaagccgtactcgcagatcttcaccgagttcgagggcaacctgaatccgtcgcaggcgcacggctccggtgacgtcaagtaccacctgggcgccaccgggctgtacctgcagatgttcggcgacaacgacattcaggtgtcgctgaccgccaacccgtcgcatctggaggccgtcgacccggtgctggagggattggtgcgggccaagcaggatctgctcgaccacggaagcatcgacagcgacggccaacgggcgttctcggtggtgccgctgatgttgcatggcgatgccgcgttcgccggtcagggtgtggtcgccgagacgctgaacctggcgaatctgccgggctaccgcgtcggcggcaccatccacatcatcgtcaacaaccagatcggcttcaccaccgcgcccgagtattccaggtccagcgagtactgcaccgacgtcgcaaagatgatcggggcaccgatctttcacgtcaacggcgacgacccggaggcgtgtgtctgggtggcgcggttggcggtggacttccgacaacggttcaagaaggacgtcgtcatcgacatgctgtgctaccgccgccgcgggcacaacgagggtgacgacccgtcgatgaccaacccctacatgtacgacgtcgtcgacaccaagcgcggggcccgcaaaagctacaccgaagccctgatcggacgtggcgacatctcgatgaaggaggccgaggacgcgctgcgcgactaccagggccagctggaacgggtgttcaacgaagtgcgcgagctggagaagcacggtgtgcagccgagcgagtcggtcgagtccgaccagatgattcccgcggggctggccactgcggtggacaagtcgctgctggcccggatcggcgatgcgttcctcgccttgccgaacggcttcaccgcgcacccgcgagtccaaccggtgctggagaagcgccgggagatggcctatgaaggcaagatcgactgggcctttggcgagctgctggcgctgggctcgctggtggccgaaggcaagctggtgcgcttgtcggggcaggacagccgccgcggcaccttctcccagcggcattcggttctcatcgaccgccacactggcgaggagttcacaccactgcagctgctggcgaccaactccgacggcagcccgaccggcggaaagttcctggtctacgactcgccactgtcggagtacgccgccgtcggcttcgagtacggctacactgtgggcaatccggacgccgtggtgctctgggaggcgcagttcggcgacttcgtcaacggcgcacagtcgatcatcgacgagttcatcagctccggtgaggccaagtggggccaattgtccaacgtcgtgctgctgttaccgcacgggcacgaggggcagggacccgaccacacttctgcccggatcgaacgcttcttgcagttgtgggcggaaggttcgatgaccatcgcgatgccgtcgactccgtcgaactacttccacctgctacgccggcatgccctggacggcatccaacgcccgctgatcgtgttcacgcccaagtcgatgttgcgtcacaaggccgccgtcagcgaaatcaaggacttcaccgagatcaagttccgctcagtgctggaggaacccacctatgaggacggcatcggagaccgcaacaaggtcagccggatcctgctgaccagtggcaagctgtattacgagctggccgcccgcaaggccaaggacaaccgcaatgacctcgcgatcgtgcggcttgaacagctcgccccgctgcccaggcgtcgactgcgtgaaacgctggaccgctacgagaacgtcaaggagttcttctgggtccaagaggaaccggccaaccagggtgcgtggccgcgattcgggctcgaactacccgagctgctgcctgacaagttggccgggatcaagcgaatctcgcgccgggcgatgtcagccccgtcgtcaggctcgtcgaaggtgcacgccgtcgaacagcaggagatcctcgacgaggcgttcggctaatctagcaagaggagaagtcgacatgaagttattaaaattggcacctgatgtttataaatttgatactgcagaggagtttatgaaatactttaaggttggaaaaggtgactttatacttactaatgaatttttatataaacctttccttgagaaattcaatgatggtgcagatgctgtatttcaggagaaatatggactcggtgaaccttctgatgaaatgataaacaatataattaaggatattggagataaacaatataatagaattattgctgtagggggaggatctgtaatagatatagccaaaatcctcagtcttaagtatactgatgattcattggatttgtttgagggaaaagtacctcttgtaaaaaacaaagaattaattatagttccaactacatgtggaacaggttcagaagttacaaatgtatcagttgcagaattaaagagaagacatactaaaaaaggaattgcttcagacgaattatatgcaacttatgcagtacttgtaccagaatttataaaaggacttccatataagttttttgtaaccagctccgtagatgccttaatacatgcaacagaagcttatgtatctccaaatgcaaatccttatactgatatgtttagtgtaaaagctatggagttaattttaaatggatacatgcaaatggtagagaaaggaaatgattacagagttgaaataattgaggattttgttataggcagcaattatgcaggtatagcttttggaaatgcaggagtgggagcggttcacgcactctcatatccaataggcggaaattatcatgtgcctcatggagaagcaaattatctgttttttacagaaatatttaaaacttattatgagaaaaatccaaatggcaagattaaagatgtaaataaactattagcaggcatactaaaatgtgatgaaagtgaagcttatgacagtttatcacaacttttagataaattattgtcaagaaaaccattaagagaatatggaatgaaagaggaagaaattgaaacttttgctgattcagtaatagaaggacagcagagactgttggtaaacaattatgaacctttttcaagagaagacatagtaaacacatataaaaagttatattaatctagaaagcttcctagaggcatcaaataaaacgaaaggctcagtcgaaagactgggcctttcgttttatctgttgtttgtcggtgaacgctctcctgagtaggacaaatccgccgccctagaccta

SEQ ID NO: 89 - DNA, 5097 bp, Artificial Sequence
  Description of Artificial Sequence: Synthetic polynucleotide
tctgtatcaggctgaaaatcttctctcatccgccaaaacagcttcggcgttaagatgcgcgctcaaggacgtaagccgtcgactctcgccgtgctggcgcaggacacggctaccactcctttctctgttgatattctgcttgccattgagcaaaccgccagcgagttcggctggaatagttttttaatcaatattttttctgaagatgacgctgcccgcgcggcacgtcagctgcttgcccaccgtccggatggcattatctatactacaatggggctgcgacatatcacgctgcctgagtctctgtatggtgaaaatattgtattggcgaactgtgtggcggatgacccagcgttacccagttatatccctgatgattacactgcacaatatgaatcaacacagcatttgctcgcggcgggctatcgtcaaccgttatgcttctggctaccggaaagtgcgttggcaacagggtatcgtcggcagggatttgagcaggcctggcgtgatgctggacgagatctggctgaggtgaaacaatttcacatggcaacaggtgatgatcactacaccgatctcgcaagtttactcaatgcccacttcaaaccgggcaaaccagattttgatgttctgatatgtggtaacgatcgcgcagcctttgtggcttatcaggttcttctggcgaagggggtacgaatcccgcaggatgtcgccgtaatgggctttgataatctggttggcgtcgggcatctgtttttaccgccgctgaccacaattcagcttccacatgacattatcgggcgggaagctgcattgcatattattgaaggtcgtgaagggggaagagtgacgcggatcccttgcccgctgttgatccgttgttccacctgatattatgttaacccagtagccagagtgctccatgttgcagcacagccactccgtgggaggcataaagcgacagttcccgttcttctggctgcggatagattcgactactcatcaccgcttccccgtcgttaataaatacttccacggatgatgtatcgataaatatccttagggcgagcgtgtcacgctgcgggaggggaatactacggtagccgtctaaattctcgtgtgggtaataccgccacaaaacaagtcgctcagattggttatcaatatacagccgcattccagtgccgagctgtaatccgtaatgttcggcatcactgttcttcagcgcccactgcaactgaatctcaactgcttgcgcgttttcctgcaaaacatatttattgctgattgtgcggggagagacagattgatgctgctggcgtaacgactcagcttcgtgtaccgggcgttgtagaagtttgccattgctctctgatagctcgcgcgccagcgtcatgcagcctgcccatccttcacgttttgagggcattggcgattcccacatatccatccagccgataacaatacgccgaccatccttcgctaaaaagctttgtggtgcataaaagtcatgcccgttatcaagttcagtaaaatgcccggattgtgcaaaaagtcgtcctggcgaccacattccgggtattacgccactttgaaagcgatttcggtaactgtatccctcggcattcattccctgcggggaaaacatcagataatgctgatcgccaaggctgaaaaagtccggacattcccacatatagctttcacccgcatcagcgtgggccagtacgcgatcgaaggtccattcacgcaacgaactgccgcgataaagcaggatctgccccgtgttgcctggatctttcgccccgactaccatccaccatgtgtcggcttcacgccacactttaggatcgcggaagtgcatgattccttctggtggagtgaggatcacaccctgtttctcgaaatgaataccatcccgactggtagccagacattgtacttcgcgaattgcatcgtcattacctgcaccatcgagccagacgtgtccggtgtagataagtgagaggacaccattgtcatcgacagcactacctgaaaaacacccgtctttgtcattatcgtctcctggcgctagcgcaataggctcatgctgccagtggatcatatcgtcgctggtggcatgtccccagtgcattggcccccagtgttcgctcatcggatgatgttgataaaacgcgtgataacgatcgttaaaccagatcaggccgtttggatcgttcatccacccggcaggaggcgcgaggtgaaaatggggatagaaagtgttaccccggtgctcatgaagttttgctagggcgttttgcgccgcatgcaatcgagattgcgtcattttaatcatcctggttaagcaaatttggtgaattgttaacgttaacttttataaaaataaagtcccttactttcataaatgcgatgaatatcacaaatgttaacgttaactatgacgttttgtgatcgaatatgcatgttttagtaaatccatgacgattttgcgaaaaagaggtttatcactatgcgtaactcagatgaatttaagggaaaaaaatgtcagccaaagtatgggttttaggggatgcggtcgtagatctcttgccagaatcagacgggcgcctactgccttgtcctggcggcgcgccagctaacgttgcggtgggaatcgccagattaggcggaacaagtgggtttataggtcgggtgggggatgatccttttggtgcgttaatgcaaagaacgctgctaactgagggagtcgatatcacgtatctgaagcaagatgaatggcaccggacatccacggtgcttgtcgatctgaacgatcaaggggaacgttcatttacgtttatggtccgccccagtgccgatctttttttagagacgacagacttgccctgctggcgacatggcgaatggttacatctctgttcaattgcgttgtctgccgagccttcgcgtaccagcgcatttactgcgatgacggcgatccggcatgccggaggttttgtcagcttcgatcctaatattcgtgaagatctatggcaagacgagcatttgctccgcttgtgtttgcggcaggcgctacaactggcggatgtcgtcaagctctcggaagaagaatggcgacttatcagtggaaaaacacagaacgatcaggatatatgcgccctggcaaaagagtatgagatcgccatgctgttggtgactaaaggtgcagaaggggtggtggtctgttatcgaggacaagttcaccattttgctggaatgtctgtgaattgtgtcgatagcacgggggcgggagatgcgttcgttgccgggttactcacaggtctgtcctctacgggattatctacagatgagagagaaatgcgacgaattatcgatctcgctcaacgttgcggagcgcttgcagtaacggcgaaaggggcaatgacagcgctgccatgtcgacaagaactggaatagtgagaagtaaacggcgaagtcgctcttatctctaaataggacgtgaattttttaacgacaggcaggtaattatggcactgaatattccattcagaaatgcgtactatcgttttgcatccagttactcatttctcttttttatttcctggtcgctgtggtggtcgttatacgctatttggctgaaaggacatctagggttgacagggacggaattaggtacactttattcggtcaaccagtttaccagcattctatttatgatgttctacggcatcgttcaggataaactcggtctgaagaaaccgctcatctggtgtatgagtttcatcctggtcttgaccggaccgtttatgatttacgtttatgaaccgttactgcaaagcaatttttctgtaggtctaattctgggggcgctattttttggcttggggtatctggcgggatgcggtttgcttgatagcttcaccgaaaaaatggcgcgaaattttcatttcgaatatggaacagcgcgcgcctggggatcttttggctatgctattggcgcgttctttgccggcatattttttagtatcagtccccatatcaacttctggttggtctcgctatttggcgctgtatttatgatgatcaacatgcgttttaaagataaggatcaccagtgcgtagcggcagatgcgggaggggtaaaaaaagaggattttatcgcagttttcaaggatcgaaacttctgggttttcgtcatatttattgtggggacgtggtctttctataacatttttgatcaacaactttttcctgtcttttattcaggtttattcgaatcacacgatgtaggaacgcgcctgtatggttatctcaactcattccaggtggtactcgaagcgctgtgcatggcgattattcctttctttgtgaatcgggtagggccaaaaaatgcattacttatcggagttgtgattatggcgttgcgtatcctttcctgcgcgctgttcgttaacccctggattatttcattagtgaagttgttacatgccattgaggttccactttgtgtcatatccgtcttcaaatacagcgtggcaaactttgataagcgcctgtcgtcgacgatctttctgattggttttcaaattgccagttcgcttgggattgtgctgctttcaacgccgactgggatactctttgaccacgcaggctaccagacagttttcttcgcaatttcgggtattgtctgcctgatgttgctatttggcattttcttcttgagtaaaaaacgcgagcaaatagttatggaaacgcctgtaccttcagcaatatagacgtaaactttttccggttgttgtcgatagctctatatccctcaaccggaaaataataatagtaaaatgcttagccctgctaataatcgcctaatccaaacgcctcattcatgttctggtacagtcgctcaaatgtacttcagatgcgcggttcgctgatttccaggacattgtcgtcattcagtgacctgtcccgtgtatcacggtcctgcgaattcatcaaggaatgcattgcggagtgaagtatcgagtcacgccatatttcgtcacccgaagatgagttttgagatattaaggcaggtgactttcactcaca

SEQ ID NO: 90 - DNA, 3525 bp, Nocardia iowensis
atggcagtggattcaccggatgagcggctacagcgccgcattgcacagttgtttgcagaagatgagcaggtcaaggccgcacgtccgctcgaagcggtgagcgcggcggtgagcgcgcccggtatgcggctggcgcagatcgccgccactgttatggcgggttacgccgaccgcccggccgccgggcagcgtgcgttcgaactgaacaccgacgacgcgacgggccgcacctcgctgcggttacttccccgattcgagaccatcacctatcgcgaactgtggcagcgagtcggcgaggttgccgcggcctggcatcatgatcccgagaaccccttgcgcgcaggtgatttcgtcgccctgctcggcttcaccagcatcgactacgccaccctcgacctggccgatatccacctcggcgcggttaccgtgccgttgcaggccagcgcggcggtgtcccagctgatcgctatcctcaccgagacttcgccgcggctgctcgcctcgaccccggagcacctcgatgcggcggtcgagtgcctactcgcgggcaccacaccggaacgactggtggtcttcgactaccaccccgaggacgacgaccagcgtgcggccttcgaatccgcccgccgccgccttgccgacgcgggcagcttggtgatcgtcgaaacgctcgatgccgtgcgtgcccggggccgcgacttaccggccgcgccactgttcgttcccgacaccgacgacgacccgctggccctgctgatctacacctccggcagcaccggaacgccgaagggcgcgatgtacaccaatcggttggccgccacgatgtggcaggggaactcgatgctgcaggggaactcgcaacgggtcgggatcaatctcaactacatgccgatgagccacatcgccggtcgcatatcgctgttcggcgtgctcgctcgcggtggcaccgcatacttcgcggccaagagcgacatgtcgacactgttcgaagacatcggcttggtacgtcccaccgagatcttcttcgtcccgcgcgtgtgcgacatggtcttccagcgctatcagagcgagctggaccggcgctcggtggcgggcgccgacctggacacgctcgatcgggaagtgaaagccgacctccggcagaactacctcggtgggcgcttcctggtggcggtcgtcggcagcgcgccgctggccgcggagatgaagacgttcatggagtccgtcctcgatctgccactgcacgacgggtacgggtcgaccgaggcgggcgcaagcgtgctgctcgacaaccagatccagcggccgccggtgctcgattacaagctcgtcgacgtgcccgaactgggttacttccgcaccgaccggccgcatccgcgcggtgagctgttgttgaaggcggagaccacgattccgggctactacaagcggcccgaggtcaccgcggagatcttcgacgaggacggcttctacaagaccggcgatatcgtggccgagctcgagcacgatcggctggtctatgtcgaccgtcgcaacaatgtgctcaaactgtcgcagggcgagttcgtgaccgtcgcccatctcgaggccgtgttcgccagcagcccgctgatccggcagatcttcatctacggcagcagcgaacgttcctatctgctcgcggtgatcgtccccaccgacgacgcgctgcgcggccgcgacaccgccaccttgaaatcggcactggccgaatcgattcagcgcatcgccaaggacgcgaacctgcagccctacgagattccgcgcgatttcctgatcgagaccgagccgttcaccatcgccaacggactgctctccggcatcgcgaagctgctgcgccccaatctgaaggaacgctacggcgctcagctggagcagatgtacaccgatctcgcgacaggccaggccgatgagctgctcgccctgcgccgcgaagccgccgacctgccggtgctcgaaaccgtcagccgggcagcgaaagcgatgctcggcgtcgcctccgccgatatgcgtcccgacgcgcacttcaccgacctgggcggcgattccctttccgcgctgtcgttctcgaacctgctgcacgagatcttcggggtcgaggtgccggtgggtgtcgtcgtcagcccggcgaacgagctgcgcgatctggcgaattacattgaggcggaacgcaactcgggcgcgaagcgtcccaccttcacctcggtgcacggcggcggttccgagatccgcgccgccgatctgaccctcgacaagttcatcgatgcccgcaccctggccgccgccgacagcattccgcacgcgccggtgccagcgcagacggtgctgctgaccggcgcgaacggctacctcggccggttcctgtgcctggaatggctggagcggctggacaagacgggtggcacgctgatctgcgtcgtgcgcggtagtgacgcggccgcggcccgtaaacggctggactcggcgttcgacagcggcgatcccggcctgctcgagcactaccagcaactggccgcacggaccctggaagtcctcgccggtgatatcggcgacccgaatctcggtctggacgacgcgacttggcagcggttggccgaaaccgtcgacctgatcgtccatcccgccgcgttggtcaaccacgtccttccctacacccagctgttcggccccaatgtcgtcggcaccgccgaaatcgtccggttggcgatcacggcgcggcgcaagccggtcacctacctgtcgaccgtcggagtggccgaccaggtcgacccggcggagtatcaggaggacagcgacgtccgcgagatgagcgcggtgcgcgtcgtgcgcgagagttacgccaacggctacggcaacagcaagtgggcgggggaggtcctgctgcgcgaagcacacgatctgtgtggcttgccggtcgcggtgttccgttcggacatgatcctggcgcacagccggtacgcgggtcagctcaacgtccaggacgtgttcacccggctgatcctcagcctggtcgccaccggcatcgcgccgtactcgttctaccgaaccgacgcggacggcaaccggcagcgggcccactatgacggcttgccggcggacttcacggcggcggcgatcaccgcgctcggcatccaagccaccgaaggcttccggacctacgacgtgctcaatccgtacgacgatggcatctccctcgatgaattcgtcgactggctcgtcgaatccggccacccgatccagcgcatcaccgactacagcgactggttccaccgtttcgagacggcgatccgcgcgctgccggaaaagcaacgccaggcctcggtgctgccgttgctggacgcctaccgcaacccctgcccggcggtccgcggcgcgatactcccggccaaggagttccaagcggcggtgcaaacagccaaaatcggtccggaacaggacatcccgcatttgtccgcgccactgatcgataagtacgtcagcgatctggaactgcttcagctgctctaa

SEQ ID NO: 91 - protein, 1174 aa, Nocardia iowensis
MAVDSPDERLQRRIAQLFAEDEQVKAARPLEAVSAAVSAPGMRLAQIAATVMAGYADRPAAGQRAFELNTDDATGRTSLRLLPRFETITYRELWQRVGEVAAAWHHDPENPLRAGDFVALLGFTSIDYATLDLADIHLGAVTVPLQASAAVSQLIAILTETSPRLLASTPEHLDAAVECLLAGTTPERLVVFDYHPEDDDQRAAFESARRRLADAGSLVIVETLDAVRARGRDLPAAPLFVPDTDDDPLALLIYTSGSTGTPKGAMYTNRLAATMWQGNSMLQGNSQRVGINLNYMPMSHIAGRISLFGVLARGGTAYFAAKSDMSTLFEDIGLVRPTEIFFVPRVCDMVFQRYQSELDRRSVAGADLDTLDREVKADLRQNYLGGRFLVAVVGSAPLAAEMKTFMESVLDLPLHDGYGSTEAGASVLLDNQIQRPPVLDYKLVDVPELGYFRTDRPHPRGELLLKAETTIPGYYKRPEVTAEIFDEDGFYKTGDIVAELEHDRLVYVDRRNNVLKLSQGEFVTVAHLEAVFASSPLIRQIFIYGSSERSYLLAVIVPTDDALRGRDTATLKSALAESIQRIAKDANLQPYEIPRDFLIETEPFTIANGLLSGIAKLLRPNLKERYGAQLEQMYTDLATGQADELLALRREAADLPVLETVSRAAKAMLGVASADMRPDAHFTDLGGDSLSALSFSNLLHEIFGVEVPVGVVVSPANELRDLANYIEAERNSGAKRPTFTSVHGGGSEIRAADLTLDKFIDARTLAAADSIPHAPVPAQTVLLTGANGYLGRFLCLEWLERLDKTGGTLICVVRGSDAAAARKRLDSAFDSGDPGLLEHYQQLAARTLEVLAGDIGDPNLGLDDATWQRLAETVDLIVHPAALVNHVLPYTQLFGPNVVGTAEIVRLAITARRKPVTYLSTVGVADQVDPAEYQEDSDVREMSAVRVVRESYANGYGNSKWAGEVLLREAHDLCGLPVAVFRSDMILAHSRYAGQLNVQDVFTRLILSLVATGIAPYSFYRTDADGNRQRAHYDGLPADFTAAAITALGIQATEGFRTYDVLNPYDDGISLDEFVDWLVESGHPIQRITDYSDWFHRFETAIRALPEKQRQASVLPLLDAYRNPCPAVRGAILPAKEFQAAVQTAKIGPEQDIPHLSAPLIDKYVSDLELLQLL

SEQ ID NO: 92 - DNA, 669 bp, Artificial Sequence
  Description of Artificial Sequence: Synthetic polynucleotide
atgattgaaaccattctgcctgcaggcgttgaaagcgcagaactgctggaatatccggaagatctgaaagcacatccggcagaagaacatctgattgccaaaagcgttgaaaaacgtcgtcgtgattttattggtgcacgtcattgtgcacgtctggcactggcagaactgggtgaacctccggttgcaattggtaaaggtgaacgtggtgcaccgatttggcctcgtggtgttgttggtagcctgacccattgtgatggttatcgtgcagcagcagttgcacataaaatgcgctttcgcagcattggtattgatgcagaaccgcatgcaaccctgccggaaggtgttctggatagcgttagcctgccgccggaacgtgaatggctgaaaaccaccgatagcgcactgcatctggatcgtctgctgttttgtgcaaaagaagccacctataaagcctggtggccgctgacagcacgttggctgggttttgaagaagcccatattacctttgaaattgaagatggtagcgcagatagcggtaatggcacctttcatagcgaactgctggttccgggtcagaccaatgatggtggtacaccgctgctgagctttgatggtcgttggctgattgcagatggttttattctgaccgcaattgcctatgcctaa

SEQ ID NO: 93 - protein, 222 aa, Artificial Sequence
  Description of Artificial Sequence: Synthetic polypeptide
MIETILPAGVESAELLEYPEDLKAHPAEEHLIAKSVEKRRRDFIGARHCARLALAELGEPPVAIGKGERGAPIWPRGVVGSLTHCDGYRAAAVAHKMRFRSIGIDAEPHATLPEGVLDSVSLPPEREWLKTTDSALHLDRLLFCAKEATYKAWWPLTARWLGFEEAHITFEIEDGSADSGNGTFHSELLVPGQTNDGGTPLLSFDGRWLIADGFILTAIAYA

SEQ ID NO: 94 - DNA, 3522 bp, Mycobacterium smegmatis
atgaccagcgatgttcacgacgccacagacggcgtcaccgaaaccgcactcgacgacgagcagtcgacccgccgcatcgccgagctgtacgccaccgatcccgagttcgccgccgccgcaccgttgcccgccgtggtcgacgcggcgcacaaacccgggctgcggctggcagagatcctgcagaccctgttcaccggctacggtgaccgcccggcgctgggataccgcgcccgtgaactggccaccgacgagggcgggcgcaccgtgacgcgtctgctgccgcggttcgacaccctcacctacgcccaggtgtggtcgcgcgtgcaagcggtcgccgcggccctgcgccacaacttcgcgcagccgatctaccccggcgacgccgtcgcgacgatcggtttcgcgagtcccgattacctgacgctggatctcgtatgcgcctacctgggcctcgtgagtgttccgctgcagcacaacgcaccggtcagccggctcgccccgatcctggccgaggtcgaaccgcggatcctcaccgtgagcgccgaatacctcgacctcgcagtcgaatccgtgcgggacgtcaactcggtgtcgcagctcgtggtgttcgaccatcaccccgaggtcgacgaccaccgcgacgcactggcccgcgcgcgtgaacaactcgccggcaagggcatcgccgtcaccaccctggacgcgatcgccgacgagggcgccgggctgccggccgaaccgatctacaccgccgaccatgatcagcgcctcgcgatgatcctgtacacctcgggttccaccggcgcacccaagggtgcgatgtacaccgaggcgatggtggcgcggctgtggaccatgtcgttcatcacgggtgaccccacgccggtcatcaacgtcaacttcatgccgctcaaccacctgggcgggcgcatccccatttccaccgccgtgcagaacggtggaaccagttacttcgtaccggaatccgacatgtccacgctgttcgaggatctcgcgctggtgcgcccgaccgaactcggcctggttccgcgcgtcgccgacatgctctaccagcaccacctcgccaccgtcgaccgcctggtcacgcagggcgccgacgaactgaccgccgagaagcaggccggtgccgaactgcgtgagcaggtgctcggcggacgcgtgatcaccggattcgtcagcaccgcaccgctggccgcggagatgagggcgttcctcgacatcaccctgggcgcacacatcgtcgacggctacgggctcaccgagaccggcgccgtgacacgcgacggtgtgatcgtgcggccaccggtgatcgactacaagctgatcgacgttcccgaactcggctacttcagcaccgacaagccctacccgcgtggcgaactgctggtcaggtcgcaaacgctgactcccgggtactacaagcgccccgaggtcaccgcgagcgtcttcgaccgggacggctactaccacaccggcgacgtcatggccgagaccgcacccgaccacctggtgtacgtggaccgtcgcaacaacgtcctcaaactcgcgcagggcgagttcgtggcggtcgccaacctggaggcggtgttctccggcgcggcgctggtgcgccagatcttcgtgtacggcaacagcgagcgcagtttccttctggccgtggtggtcccgacgccggaggcgctcgagcagtacgatccggccgcgctcaaggccgcgctggccgactcgctgcagcgcaccgcacgcgacgccgaactgcaatcctacgaggtgccggccgatttcatcgtcgagaccgagccgttcagcgccgccaacgggctgctgtcgggtgtcggaaaactgctgcggcccaacctcaaagaccgctacgggcagcgcctggagcagatgtacgccgatatcgcggccacgcaggccaaccagttgcgcgaactgcggcgcgcggccgccacacaaccggtgatcgacaccctcacccaggccgctgccacgatcctcggcaccgggagcgaggtggcatccgacgcccacttcaccgacctgggcggggattccctgtcggcgctgacactttcgaacctgctgagcgatttcttcggtttcgaagttcccgtcggcaccatcgtgaacccggccaccaacctcgcccaactcgcccagcacatcgaggcgcagcgcaccgcgggtgaccgcaggccgagtttcaccaccgtgcacggcgcggacgccaccgagatccgggcgagtgagctgaccctggacaagttcatcgacgccgaaacgctccgggccgcaccgggtctgcccaaggtcaccaccgagccacggacggtgttgctctcgggcgccaacggctggctgggccggttcctcacgttgcagtggctggaacgcctggcacctgtcggcggcaccctcatcacgatcgtgcggggccgcgacgacgccgcggcccgcgcacggctgacccaggcctacgacaccgatcccgagttgtcccgccgcttcgccgagctggccgaccgccacctgcgggtggtcgccggtgacatcggcgacccgaatctgggcctcacacccgagatctggcaccggctcgccgccgaggtcgacctggtggtgcatccggcagcgctggtcaaccacgtgctcccctaccggcagctgttcggccccaacgtcgtgggcacggccgaggtgatcaagctggccctcaccgaacggatcaagcccgtcacgtacctgtccaccgtgtcggtggccatggggatccccgacttcgaggaggacggcgacatccggaccgtgagcccggtgcgcccgctcgacggcggatacgccaacggctacggcaacagcaagtgggccggcgaggtgctgctgcgggaggcccacgatctgtgcgggctgcccgtggcgacgttccgctcggacatgatcctggcgcatccgcgctaccgcggtcaggtcaacgtgccagacatgttcacgcgactcctgttgagcctcttgatcaccggcgtcgcgccgcggtcgttctacatcggagacggtgagcgcccgcgggcgcactaccccggcctgacggtcgatttcgtggccgaggcggtcacgacgctcggcgcgcagcagcgcgagggatacgtgtcctacgacgtgatgaacccgcacgacgacgggatctccctggatgtgttcgtggactggctgatccgggcgggccatccgatcgaccgggtcgacgactacgacgactgggtgcgtcggttcgagaccgcgttgaccgcgcttcccgagaagcgccgcgcacagaccgtactgccgctgctgcacgcgttccgcgctccgcaggcaccgttgcgcggcgcacccgaacccacggaggtgttccacgccgcggtgcgcaccgcgaaggtgggcccgggagacatcccgcacctcgacgaggcgctgatcgacaagtacatacgcgatctgcgtgagttcggtctgatctaa

SEQ ID NO: 95 - protein, 1173 aa, Mycobacterium smegmatis
MTSDVHDATDGVTETALDDEQSTRRIAELYATDPEFAAAAPLPAVVDAAHKPGLRLAEILQTLFTGYGDRPALGYRARELATDEGGRTVTRLLPRFDTLTYAQVWSRVQAVAAALRHNFAQPIYPGDAVATIGFASPDYLTLDLVCAYLGLVSVPLQHNAPVSRLAPILAEVEPRILTVSAEYLDLAVESVRDVNSVSQLVVFDHHPEVDDHRDALARAREQLAGKGIAVTTLDAIADEGAGLPAEPIYTADHDQRLAMILYTSGSTGAPKGAMYTEAMVARLWTMSFITGDPTPVINVNFMPLNHLGGRIPISTAVQNGGTSYFVPESDMSTLFEDLALVRPTELGLVPRVADMLYQHHLATVDRLVTQGADELTAEKQAGAELREQVLGGRVITGFVSTAPLAAEMRAFLDITLGAHIVDGYGLTETGAVTRDGVIVRPPVIDYKLIDVPELGYFSTDKPYPRGELLVRSQTLTPGYYKRPEVTASVFDRDGYYHTGDVMAETAPDHLVYVDRRNNVLKLAQGEFVAVANLEAVFSGAALVRQIFVYGNSERSFLLAVVVPTPEALEQYDPAALKAALADSLQRTARDAELQSYEVPADFIVETEPFSAANGLLSGVGKLLRPNLKDRYGQRLEQMYADIAATQANQLRELRRAAATQPVIDTLTQAAATILGTGSEVASDAHFTDLGGDSLSALTLSNLLSDFFGFEVPVGTIVNPATNLAQLAQHIEAQRTAGDRRPSFTTVHGADATEIRASELTLDKFIDAETLRAAPGLPKVTTEPRTVLLSGANGWLGRFLTLQWLERLAPVGGTLITIVRGRDDAAARARLTQAYDTDPELSRRFAELADRHLRVVAGDIGDPNLGLTPEIWHRLAAEVDLVVHPAALVNHVLPYRQLFGPNVVGTAEVIKLALTERIKPVTYLSTVSVAMGIPDFEEDGDIRTVSPVRPLDGGYANGYGNSKWAGEVLLREAHDLCGLPVATFRSDMILAHPRYRGQVNVPDMFTRLLLSLLITGVAPRSFYIGDGERPRAHYPGLTVDFVAEAVTTLGAQQREGYVSYDVMNPHDDGISLDVFVDWLIRAGHPIDRVDDYDDWVRRFETALTALPEKRRAQTVLPLLHAFRAPQAPLRGAPEPTEVFHAAVRTAKVGPGDIPHLDEALIDKYIRDLREFGLI

SEQ ID NO: 96 - DNA, 3522 bp, Mycobacterium avium
atgtcgactgccacccatgacgaacgactcgaccgtcgcgtccacgaactcatcgccaccgacccgcaattcgccgccgcccaacccgacccggcgatcaccgccgccctcgaacagcccgggctgcggctgccgcagatcatccgcaccgtgctcgacggctacgccgaccggccggcgctgggacagcgcgtggtggagttcgtcacggacgccaagaccgggcgcacgtcggcgcagctgctcccccgcttcgagaccatcacgtacagcgaagtagcgcagcgtgtttcggcgctgggccgcgccctgtccgacgacgcggtgcaccccggcgaccgggtgtgcgtgctgggcttcaacagcgtcgactacgccaccatcgacatggcgctgggcgccatcggcgccgtctcggtgccgctgcagaccagcgcggcaatcagctcgctgcagccgatcgtggccgagaccgagcccaccctgatcgcgtccagcgtgaaccagctgtccgacgcggtgcagctgatcaccggcgccgagcaggcgcccacccggctggtggtgttcgactaccacccgcaggtcgacgaccagcgcgaggccgtccaggacgccgcggcgcggctgtccagcaccggcgtggccgtccagacgctggccgagctgctggagcgcggcaaggacctgcccgccgtcgcggagccgcccgccgacgaggactcgctggccctgctgatctacacctccgggtccaccggcgcccccaagggcgcgatgtacccacagagcaacgtcggcaagatgtggcgccgcggcagcaagaactggttcggcgagagcgccgcgtcgatcaccctgaacttcatgccgatgagccacgtgatgggccgaagcatcctctacggcacgctgggcaacggcggcaccgcctacttcgccgcccgcagcgacctgtccaccctgcttgaggacctcgagctggtgcggcccaccgagctcaacttcgtcccgcggatctgggagacgctgtacggcgaattccagcgtcaggtcgagcggcggctctccgaggccggggacgccggcgaacgtcgcgccgtcgaggccgaggtgctggccgagcagcgccagtacctgctgggcgggcggttcaccttcgcgatgacgggctcggcgcccatctcgccggagctgcgcaactgggtcgagtcgctgctcgaaatgcacctgatggacggctacggctccaccgaggccggaatggtgttgttcgacggggagattcagcgcccgccggtgatcgactacaagctggtcgacgtgccggacctgggctacttcagcaccgaccggccgcatccgcgcggcgagctgctgctgcgcaccgagaacatgttcccgggctactacaagcgggccgaaaccaccgcgggcgtcttcgacgaggacggctactaccgcaccggcgacgtgttcgccgagatcgccccggaccggctggtctacgtcgaccgccgcaacaacgtgctcaagctggcgcagggcgaattcgtcacgctggccaagctggaggcggtgttcggcaacagcccgctgatccgccagatctacgtctacggcaacagcgcccagccctacctgctggcggtcgtggtgcccaccgaggaggcgctggcctcgggtgaccccgagacgctcaagcccaagatcgccgactcgctgcagcaggtcgccaaggaggccggcctgcagtcctacgaggtgccgcgcgacttcatcatcgagaccaccccgttcagcctggaaaacggtctgctgaccgggatccggaagctggcgtggccgaaactgaagcagcactacggggaacggctggagcagatgtacgccgacctggccgccggacaggccaacgagctggccgagctgcgccgcaacggtgcccaggcgccggtgttgcagaccgtgagccgcgccgcgggcgccatgctgggttcggccgcctccgacctgtcccccgacgcccacttcaccgatctgggcggagactcgttgtcggcgttgacattcggcaacctgctgcgcgagatcttcgacgtcgacgtgccggtaggcgtgatcgtcagcccggccaacgacctggcggccatcgcgagctacatcgaggccgagcggcagggcagcaagcgcccgacgttcgcctcggtgcacggccgggacgcgaccgtggtgcgcgccgccgacctgacgctggacaagttcctcgacgccgagacgctggccgccgcgccgaacctgcccaagccggccaccgaggtgcgcaccgtgctgctgaccggcgccaccggcttcctgggccgctacctggccctggaatggctggagcggatggacatggtggacggcaaggtcatcgccctggtccgggcccgctccgacgaggaggcacgcgcccggctggacaagaccttcgacagcggcgacccgaaactgctcgcgcactaccagcagctggccgccgatcacctggaggtcatcgccggcgacaagggcgaggccaatctgggcctgggccaagacgtttggcaacgactggccgacacggtcgacgtgatcgtcgaccccgccgcgctggtcaaccacgtgttgccgtacagcgagctgttcgggcccaacgccctgggcaccgcggagctgatccggctggcgctgacgtccaagcagaagccgtacacctacgtgtccaccatcggcgtgggcgaccagatcgagccgggcaagttcgtcgagaacgccgacatccggcagatgagcgccacccgggcgatcaacgacagctacgccaacggctatggcaacagcaagtgggccggcgaggtgctgctgcgcgaggcgcacgacctgtgcgggctgcccgtcgcggtgttccgctgcgacatgatcctggccgacaccacgtatgccgggcagctcaacctgccggacatgttcacccggctgatgctgagcctggtggccaccgggatcgcgcccggctcgttctacgagctcgacgccgacggcaaccggcagcgggcgcactacgacggcctgccggtcgagttcatcgccgcggcgatctcgacgctgggttcgcagatcaccgacagcgacaccggcttccagacctaccacgtgatgaacccctacgatgacggcgtcggtctggacgagtacgtcgattggctggtggacgccggctattcgatcgagcggatcgccgactactccgaatggctgcggcggttcgagacctcgctgcgggccctgccggaccggcagcgccagtactcgctgctgccgctgctgcacaactaccgcacgccggagaagccgatcaacgggtcgatagctcccaccgacgtgttccgggcagcggtgcaggaggcgaaaatcggccccgacaaagacattccgcacgtgtcgccgccggtcatcgtcaagtacatcaccgacctgcagctgctcgggctgctctaa

SEQ ID NO: 97 - protein, 1173 aa, Mycobacterium avium
MSTATHDERLDRRVHELIATDPQFAAAQPDPAITAALEQPGLRLPQIIRTVLDGYADRPALGQRVVEFVTDAKTGRTSAQLLPRFETITYSEVAQRVSALGRALSDDAVHPGDRVCVLGFNSVDYATIDMALGAIGAVSVPLQTSAAISSLQPIVAETEPTLIASSVNQLSDAVQLITGAEQAPTRLVVFDYHPQVDDQREAVQDAAARLSSTGVAVQTLAELLERGKDLPAVAEPPADEDSLALLIYTSGSTGAPKGAMYPQSNVGKMWRRGSKNWFGESAASITLNFMPMSHVMGRSILYGTLGNGGTAYFAARSDLSTLLEDLELVRPTELNFVPRIWETLYGEFQRQVERRLSEAGDAGERRAVEAEVLAEQRQYLLGGRFTFAMTGSAPISPELRNWVESLLEMHLMDGYGSTEAGMVLFDGEIQRPPVIDYKLVDVPDLGYFSTDRPHPRGELLLRTENMFPGYYKRAETTAGVFDEDGYYRTGDVFAEIAPDRLVYVDRRNNVLKLAQGEFVTLAKLEAVFGNSPLIRQIYVYGNSAQPYLLAVVVPTEEALASGDPETLKPKIADSLQQVAKEAGLQSYEVPRDFIIETTPFSLENGLLTGIRKLAWPKLKQHYGERLEQMYADLAAGQANELAELRRNGAQAPVLQTVSRAAGAMLGSAASDLSPDAHFTDLGGDSLSALTFGNLLREIFDVDVPVGVIVSPANDLAAIASYIEAERQGSKRPTFASVHGRDATVVRAADLTLDKFLDAETLAAAPNLPKPATEVRTVLLTGATGFLGRYLALEWLERMDMVDGKVIALVRARSDEEARARLDKTFDSGDPKLLAHYQQLAADHLEVIAGDKGEANLGLGQDVWQRLADTVDVIVDPAALVNHVLPYSELFGPNALGTAELIRLALTSKQKPYTYVSTIGVGDQIEPGKFVENADIRQMSATRAINDSYANGYGNSKWAGEVLLREAHDLCGLPVAVFRCDMILADTTYAGQLNLPDMFTRLMLSLVATGIAPGSFYELDADGNRQRAHYDGLPVEFIAAAISTLGSQITDSDTGFQTYHVMNPYDDGVGLDEYVDWLVDAGYSIERIADYSEWLRRFETSLRALPDRQRQYSLLPLLHNYRTPEKPINGSIAPTDVFRAAVQEAKIGPDKDIPHVSPPVIVKYITDLQLLGLL

SEQ ID NO: 98 - DNA, 3525 bp, Mycobacterium marinum
atgtcgccaatcacgcgtgaagagcggctcgagcgccgcatccaggacctctacgccaacgacccgcagttcgccgccgccaaacccgccacggcgatcaccgcagcaatcgagcggccgggtctaccgctaccccagatcatcgagaccgtcatgaccggatacgccgatcggccggctctcgctcagcgctcggtcgaattcgtgaccgacgccggcaccggccacaccacgctgcgactgctcccccacttcgaaaccatcagctacggcgagctttgggaccgcatcagcgcactggccgacgtgctcagcaccgaacagacggtgaaaccgggcgaccgggtctgcttgttgggcttcaacagcgtcgactacgccacgatcgacatgactttggcgcggctgggcgcggtggccgtaccactgcagaccagcgcggcgataacccagctgcagccgatcgtcgccgagacccagcccaccatgatcgcggccagcgtcgacgcactcgctgacgccaccgaattggctctgtccggtcagaccgctacccgagtcctggtgttcgaccaccaccggcaggttgacgcacaccgcgcagcggtcgaatccgcccgggagcgcctggccggctcggcggtcgtcgaaaccctggccgaggccatcgcgcgcggcgacgtgccccgcggtgcgtccgccggctcggcgcccggcaccgatgtgtccgacgactcgctcgcgctactgatctacacctcgggcagcacgggtgcgcccaagggcgcgatgtacccccgacgcaacgttgcgaccttctggcgcaagcgcacctggttcgaaggcggctacgagccgtcgatcacgctgaacttcatgccaatgagccacgtcatgggccgccaaatcctgtacggcacgctgtgcaatggcggcaccgcctacttcgtggcgaaaagcgatctctccaccttgttcgaagacctggcgctggtgcggcccaccgagctgaccttcgtgccgcgcgtgtgggacatggtgttcgacgagtttcagagtgaggtcgaccgccgcctggtcgacggcgccgaccgggtcgcgctcgaagcccaggtcaaggccgagatacgcaacgacgtgctcggtggacggtataccagcgcactgaccggctccgcccctatctccgacgagatgaaggcgtgggtcgaggagctgctcgacatgcatctggtcgagggctacggctccaccgaggccgggatgatcctgatcgacggagccattcggcgcccggcggtactcgactacaagctggtcgatgttcccgacctgggttacttcctgaccgaccggccacatccgcggggcgagttgctggtcaagaccgatagtttgttcccgggctactaccagcgagccgaagtcaccgccgacgtgttcgatgctgacggcttctaccggaccggcgacatcatggccgaggtcggccccgaacagttcgtgtacctcgaccgccgcaacaacgtgttgaagctgtcgcagggcgagttcgtcaccgtctccaaactcgaagcggtgtttggcgacagcccactggtacggcagatctacatctacggcaacagcgcccgtgcctacctgttggcggtgatcgtccccacccaggaggcgctggacgccgtgcctgtcgaggagctcaaggcgcggctgggcgactcgctgcaagaggtcgcaaaggccgccggcctgcagtcctacgagatcccgcgcgacttcatcatcgaaacaacaccatggacgctggagaacggcctgctcaccggcatccgcaagttggccaggccgcagctgaaaaagcattacggcgagcttctcgagcagatctacacggacctggcacacggccaggccgacgaactgcgctcgctgcgccaaagcggtgccgatgcgccggtgctggtgacggtgtgccgtgcggcggccgcgctgttgggcggcagcgcctctgacgtccagcccgatgcgcacttcaccgatttgggcggcgactcgctgtcggcgctgtcgttcaccaacctgctgcacgagatcttcgacatcgaagtgccggtgggcgtcatcgtcagccccgccaacgacttgcaggccctggccgactacgtcgaggcggctcgcaaacccggctcgtcacggccgaccttcgcctcggtccacggcgcctcgaatgggcaggtcaccgaggtgcatgccggtgacctgtccctggacaaattcatcgatgccgcaaccctggccgaagctccccggctgcccgccgcaaacacccaagtgcgcaccgtgctgctgaccggcgccaccggcttcctcgggcgctacctggccctggaatggctggagcggatggacctggtcgacggcaaactgatctgcctggtccgggccaagtccgacaccgaagcacgggcgcggctggacaagacgttcgacagcggcgaccccgaactgctggcccactaccgcgcactggccggcgaccacctcgaggtgctcgccggtgacaagggcgaagccgacctcggactggaccggcagacctggcaacgcctggccgacacggtcgacctgatcgtcgaccccgcggccctggtcaaccacgtactgccatacagccagctgttcgggcccaacgcgctgggcaccgccgagctgctgcggctggcgctcacctccaagatcaagccctacagctacacctcgacaatcggtgtcgccgaccagatcccgccgtcggcgttcaccgaggacgccgacatccgggtcatcagcgccacccgcgcggtcgacgacagctacgccaatggctactcgaacagcaagtgggccggcgaggtgctgttgcgcgaggcgcatgacctgtgtggcctgccggttgcggtgttccgctgcgacatgatcctggccgacaccacatgggcgggacagctcaatgtgccggacatgttcacccggatgatcctgagcctggcggccaccggtatcgcgccgggttcgttctatgagcttgcggccgacggcgcccggcaacgcgcccactatgacggtctgcccgtcgagttcatcgccgaggcgatttcgactttgggtgcgcagagccaggatggtttccacacgtatcacgtgatgaacccctacgacgacggcatcggactcgacgagttcgtcgactggctcaacgagtccggttgccccatccagcgcatcgctgactatggcgactggctgcagcgcttcgaaaccgcactgcgcgcactgcccgatcggcagcggcacagctcactgctgccgctgttgcacaactatcggcagccggagcggcccgtccgcgggtcgatcgcccctaccgatcgcttccgggcagcggtgcaagaggccaagatcggccccgacaaagacattccgcacgtcggcgcgccgatcatcgtgaagtacgtcagcgacctgcgcctactcggcctgctctaa

SEQ ID NO: 99 - protein, 1174 aa, Mycobacterium marinum
MSPITREERLERRIQDLYANDPQFAAAKPATAITAAIERPGLPLPQIIETVMTGYADRPALAQRSVEFVTDAGTGHTTLRLLPHFETISYGELWDRISALADVLSTEQTVKPGDRVCLLGFNSVDYATIDMTLARLGAVAVPLQTSAAITQLQPIVAETQPTMIAASVDALADATELALSGQTATRVLVFDHHRQVDAHRAAVESARERLAGSAVVETLAEAIARGDVPRGASAGSAPGTDVSDDSLALLIYTSGSTGAPKGAMYPRRNVATFWRKRTWFEGGYEPSITLNFMPMSHVMGRQILYGTLCNGGTAYFVAKSDLSTLFEDLALVRPTELTFVPRVWDMVFDEFQSEVDRRLVDGADRVALEAQVKAEIRNDVLGGRYTSALTGSAPISDEMKAWVEELLDMHLVEGYGSTEAGMILIDGAIRRPAVLDYKLVDVPDLGYFLTDRPHPRGELLVKTDSLFPGYYQRAEVTADVFDADGFYRTGDIMAEVGPEQFVYLDRRNNVLKLSQGEFVTVSKLEAVFGDSPLVRQIYIYGNSARAYLLAVIVPTQEALDAVPVEELKARLGDSLQEVAKAAGLQSYEIPRDFIIETTPWTLENGLLTGIRKLARPQLKKHYGELLEQIYTDLAHGQADELRSLRQSGADAPVLVTVCRAAAALLGGSASDVQPDAHFTDLGGDSLSALSFTNLLHEIFDIEVPVGVIVSPANDLQALADYVEAARKPGSSRPTFASVHGASNGQVTEVHAGDLSLDKFIDAATLAEAPRLPAANTQVRTVLLTGATGFLGRYLALEWLERMDLVDGKLICLVRAKSDTEARARLDKTFDSGDPELLAHYRALAGDHLEVLAGDKGEADLGLDRQTWQRLADTVDLIVDPAALVNHVLPYSQLFGPNALGTAELLRLALTSKIKPYSYTSTIGVADQIPPSAFTEDADIRVISATRAVDDSYANGYSNSKWAGEVLLREAHDLCGLPVAVFRCDMILADTTWAGQLNVPDMFTRMILSLAATGIAPGSFYELAADGARQRAHYDGLPVEFIAEAISTLGAQSQDGFHTYHVMNPYDDGIGLDEFVDWLNESGCPIQRIADYGDWLQRFETALRALPDRQRHSSLLPLLHNYRQPERPVRGSIAPTDRFRAAVQEAKIGPDKDIPHVGAPIIVKYVSDLRLLGLL

SEQ ID NO: 100 - DNA, 40 bp, Artificial Sequence
  Description of Artificial Sequence: Synthetic primer
gaggagaagtcgacatgaacgaacaatattccgcattgcg

SEQ ID NO: 101 - DNA, 39 bp, Artificial Sequence
  Description of Artificial Sequence: Synthetic primer
ggaagctttctagattagccggtattacgcatacctgcc

SEQ ID NO: 102 - DNA, 47 bp, Artificial Sequence
  Description of Artificial Sequence: Synthetic primer
taagctagcaagaggagaagtcgacatgcagaacagcgctttgaaag

SEQ ID NO: 103 - DNA, 43 bp, Artificial Sequence
  Description of Artificial Sequence: Synthetic primer
gcctctaggaagctttctagattactttttcttcgctttggcg

SEQ ID NO: 104 - DNA, 49 bp, Artificial Sequence
  Description of Artificial Sequence: Synthetic primer
ctagcaagaggagaagtcgacatgcctgacgctaaaaaacaggggcggt

SEQ ID NO: 105 - DNA, 48 bp, Artificial Sequence
  Description of Artificial Sequence: Synthetic primer
ctaggaagctttctagagtcgttaatcgtgagcgcctatttcgcgcag

SEQ ID NO: 106 - DNA, 51 bp, Artificial Sequence
  Description of Artificial Sequence: Synthetic primer
ctagcaagaggagaagtcgacatgacaaagtatgcattagtcggtgatgtg

SEQ ID NO: 107 - DNA, 54 bp, Artificial Sequence
  Description of Artificial Sequence: Synthetic primer
ctaggaagctttctagagtcgttacagaatgtgacctaaggtctggcgtaaatg

SEQ ID NO: 108 - DNA, 51 bp, Artificial Sequence
  Description of Artificial Sequence: Synthetic primer
ctagcaagaggagaagtcgacatgagttctgaaagtagtcagggtctagtc

SEQ ID NO: 109 - DNA, 45 bp, Artificial Sequence
  Description of Artificial Sequence: Synthetic primer
ctaggaagctttctagagtcgttacttctgggagcgccacatctc

SEQ ID NO: 110 - DNA, 45 bp, Artificial Sequence
  Description of Artificial Sequence: Synthetic primer
tagcaagaggagaagtcgacatggactggaagaagatctatgaag

SEQ ID NO: 111 - DNA, 39 bp, Artificial Sequence
  Description of Artificial Sequence: Synthetic primer
cctctaggaagctttctagattagaatgccgcgttgaag

SEQ ID NO: 112 - DNA, 42 bp, Artificial Sequence
  Description of Artificial Sequence: Synthetic primer
tagcaagaggagaagtcgacatgagctggcaagaactgtatc

SEQ ID NO: 113 - DNA, 47 bp, Artificial Sequence
  Description of Artificial Sequence: Synthetic primer
cctctaggaagctttctagattaatatttctctttaaagcgcttttc

SEQ ID NO: 114 - DNA, 43 bp, Artificial Sequence
  Description of Artificial Sequence: Synthetic primer
tagcaagaggagaagtcgacatggcacgttttactttaccaag

SEQ ID NO: 115 - DNA, 52 bp, Artificial Sequence
  Description of Artificial Sequence: Synthetic primer
cctctaggaagctttctagattacaaattaactttagttccatagtatgtgc

SEQ ID NO: 116 - DNA, 100 bp, Artificial Sequence
  Description of Artificial Sequence: Synthetic primer
accggtaaacgactcagcagcctgacgcactggcgatattattttgccttctcctcaccacagaatgttctgccacctgacgatatcaaattacgccccg

SEQ ID NO: 117 - DNA, 104 bp, Artificial Sequence
  Description of Artificial Sequence: Synthetic primer
tgcttatccacaacattttgcgcacggttatgtggacaaaatacctggttacccaggccgtgccggcacgttaaccgggccctaggtctagggcggcggatttg

SEQ ID NO: 118 - DNA, 20 bp, Artificial Sequence
  Description of Artificial Sequence: Synthetic primer
aggcagttccataggatggc

SEQ ID NO: 119 - DNA, 40 bp, Artificial Sequence
  Description of Artificial Sequence: Synthetic primer
ataataataggtaccggcggcgctggcgcagcttgctgcg

SEQ ID NO: 120 - DNA, 41 bp, Artificial Sequence
  Description of Artificial Sequence: Synthetic primer
tattattatggatccaacccgataatggtagatctccctct

SEQ ID NO: 121 - DNA, 41 bp, Artificial Sequence
  Description of Artificial Sequence: Synthetic primer
ataataataggatccggagcagaaacaatgtggtatttact

SEQ ID NO: 122 - DNA, 43 bp, Artificial Sequence
  Description of Artificial Sequence: Synthetic primer
tattattatctgcagatgctcttttttatgcattacaaactgc

SEQ ID NO: 123 - DNA, 35 bp, Artificial Sequence
  Description of Artificial Sequence: Synthetic primer
taataataaggtaccaactgggcttgcttcactgg

SEQ ID NO: 124 - DNA, 35 bp, Artificial Sequence
  Description of Artificial Sequence: Synthetic primer
taataataaagatctgcctcgaccgttcaggaagg

SEQ ID NO: 125 - DNA, 38 bp, Artificial Sequence
  Description of Artificial Sequence: Synthetic primer
taataataaagatcttaactctccagtaacaaagctgc

SEQ ID NO: 126 - DNA, 34 bp, Artificial Sequence
  Description of Artificial Sequence: Synthetic primer
taataataactgcaggctatgtcaccacttacgg

SEQ ID NO: 127 - DNA, 37 bp, Artificial Sequence
  Description of Artificial Sequence: Synthetic primer
tattattattcctgcaggcgtctttgttcttccgtcc

SEQ ID NO: 128 - DNA, 38 bp, Artificial Sequence
  Description of Artificial Sequence: Synthetic primer
tattattatcttcggtacctttagcatctgcttcggcc

SEQ ID NO: 129 - DNA, 39 bp, Artificial Sequence
  Description of Artificial Sequence: Synthetic primer
tattattatggatcccggtaatgcaacaaaagttagagc

SEQ ID NO: 130 - DNA, 48 bp, Artificial Sequence
  Description of Artificial Sequence: Synthetic primer
tattattatggatccaaagtgactgacatgaatatccttgatttgttc

SEQ ID NO: 131 - DNA, 39 bp, Artificial Sequence
  Description of Artificial Sequence: Synthetic primer
taataataaggatcctacactggcggatgtggcataaac

SEQ ID NO: 132 - DNA, 39 bp, Artificial Sequence
  Description of Artificial Sequence: Synthetic primer
taataatttggtacccattcacagtcaccaggtacaacg

SEQ ID NO: 133 - DNA, 39 bp, Artificial Sequence
  Description of Artificial Sequence: Synthetic primer
taataataaggatccgagaataacatgaatggtgcattg

SEQ ID NO: 134 - DNA, 39 bp, Artificial Sequence
  Description of Artificial Sequence: Synthetic primer
taataatatctgcagatccacaaaaagccctggcaattg

SEQ ID NO: 135 - DNA, 31 bp, Artificial Sequence
  Description of Artificial Sequence: Synthetic primer
gataatcccccctgcagggagcggtaaatag

SEQ ID NO: 136 - DNA, 34 bp, Artificial Sequence
  Description of Artificial Sequence: Synthetic primer
tattattttggatccttctctggtgttgtttggg

SEQ ID NO: 137 - DNA, 33 bp, Artificial Sequence
  Description of Artificial Sequence: Synthetic primer
tattattatggatccgcgtggtgttgaaagccg

SEQ ID NO: 138 - DNA, 38 bp, Artificial Sequence
  Description of Artificial Sequence: Synthetic primer
tattataaaggtaccgcctcttccaggtcagtgaaggg

SEQ ID NO: 139 - DNA, 36 bp, Artificial Sequence
  Description of Artificial Sequence: Synthetic primer
taataataaggtacccagttttggctatgccttaag

SEQ ID NO: 140 - DNA, 34 bp, Artificial Sequence
  Description of Artificial Sequence: Synthetic primer
taataatcattaagcttgctccctttgctgggcc

SEQ ID NO: 141 - DNA, 35 bp, Artificial Sequence
  Description of Artificial Sequence: Synthetic primer
taataataataagctttttacgcctcaaactttcg

SEQ ID NO: 142 - DNA, 41 bp, Artificial Sequence
  Description of Artificial Sequence: Synthetic primer
taataataaattgccctgcagcgtaagattgtcgttcaggg

SEQ ID NO: 143 - DNA, 31 bp, Artificial Sequence
  Description of Artificial Sequence: Synthetic primer
tattattattgtttggtacctctgtgccgct

SEQ ID NO: 144 - DNA, 33 bp, Artificial Sequence
  Description of Artificial Sequence: Synthetic primer
aatgttccactctgcagggatgataataagggg

SEQ ID NO: 145 - DNA, 29 bp, Artificial Sequence
  Description of Artificial Sequence: Synthetic primer
atcggatccaatcgcacactaacagactg

SEQ ID NO: 146 - DNA, 38 bp, Artificial Sequence
  Description of Artificial Sequence: Synthetic primer
acagctttggatcctcattgtgtttactcctgattagc

SEQ ID NO: 147 - DNA, 42 bp, Artificial Sequence
  Description of Artificial Sequence: Synthetic primer
ataataatatctagagcagcaagccgcgcggcaggtggtcag

SEQ ID NO: 148 - DNA, 42 bp, Artificial Sequence
  Description of Artificial Sequence: Synthetic primer
tattattatctgcagacgccatcctgatccatatgtatatgg

SEQ ID NO: 149 - DNA, 42 bp, Artificial Sequence
  Description of Artificial Sequence: Synthetic primer
tattattatggatccagttcctccttttcggatgatgttctg

SEQ ID NO: 150 - DNA, 42 bp, Artificial Sequence
  Description of Artificial Sequence: Synthetic primer
ataataataggatccgaggcctttgctgcgactgccatgttc

SEQ ID NO: 151 - DNA, 20 bp, Artificial Sequence
  Description of Artificial Sequence: Synthetic primer
cgccacaaccagtgacaccc

SEQ ID NO: 152 - DNA, 24 bp, Artificial Sequence
  Description of Artificial Sequence: Synthetic primer
ggggttttagtcgccctttctggc

SEQ ID NO: 153 - DNA, 24 bp, Artificial Sequence
  Description of Artificial Sequence: Synthetic primer
cgggatctggtggcgtttaaagtg

SEQ ID NO: 154 - DNA, 21 bp, Artificial Sequence
  Description of Artificial Sequence: Synthetic primer
tgacggcgtttgtcttcaccg

SEQ ID NO: 155 - DNA, 53 bp, Artificial Sequence
  Description of Artificial Sequence: Synthetic primer
acgctatggaactgcaggatgagagcatgaaatggaacggatgcgcgccttat

SEQ ID NO: 156 - DNA, 53 bp, Artificial Sequence
  Description of Artificial Sequence: Synthetic primer
acgctatggaactgcaggatgagagcatctgccccagatcgttggctttttgc

SEQ ID NO: 157 - DNA, 40 bp, Artificial Sequence
  Description of Artificial Sequence: Synthetic primer
tttgaaaacaggatgtagcgatgaccgatattcgcttgta

SEQ ID NO: 158 - DNA, 40 bp, Artificial Sequence
  Description of Artificial Sequence: Synthetic primer
tacaagcgaatatcggtcatcgctacatcctgttttcaaa

SEQ ID NO: 159 - DNA, 40 bp, Artificial Sequence
  Description of Artificial Sequence: Synthetic primer
cgcctgaatactacgattgactggagaatgcgaatgaaca

SEQ ID NO: 160 - DNA, 40 bp, Artificial Sequence
  Description of Artificial Sequence: Synthetic primer
tgttcattcgcattctccagtcaatcgtagtattcaggcg

SEQ ID NO: 161 - DNA, 39 bp, Artificial Sequence
  Description of Artificial Sequence: Synthetic primer
tttgaaaacaggatgtagcggcccgtagtctgcaaatcc

SEQ ID NO: 162 - DNA, 39 bp, Artificial Sequence
  Description of Artificial Sequence: Synthetic primer
ggatttgcagactacgggccgctacatcctgttttcaaa

SEQ ID NO: 163 - DNA, 40 bp, Artificial Sequence
  Description of Artificial Sequence: Synthetic primer
gcattacgctgacttgacggctggagaatgcgaatgaaca

SEQ ID NO: 164 - DNA, 40 bp, Artificial Sequence
  Description of Artificial Sequence: Synthetic primer
tgttcattcgcattctccagccgtcaagtcagcgtaatgc

SEQ ID NO: 165 - DNA, 200 bp, Artificial Sequence
  Description of Artificial Sequence: Synthetic polynucleotide
actggagaatgcgaatgaacagcaataaagagttaatgcagcgccgcagtcaggcgattccccgtggcgttgggcaaattcacccgattttcgctgaccgcgcggaaaactgccgggtgtgggacgttgaaggccgtgagtatcttgatttcgcgggcgggattgcggtgctcaataccgggcacctgcatccgaaggtg

SEQ ID NO: 166 - DNA, 21 bp, Artificial Sequence
  Description of Artificial Sequence: Synthetic oligonucleotide
ggcgaaagagtctgctccggc

SEQ ID NO: 167 - DNA, 23 bp, Artificial Sequence
  Description of Artificial Sequence: Synthetic oligonucleotide
cattcagacacaacgcatcgcgg

SEQ ID NO: 168 - DNA, 43 bp, Artificial Sequence
  Description of Artificial Sequence: Synthetic oligonucleotide
ggcttaccagcaccggtgggttatgcccgtagtctgcaaatcc

SEQ ID NO: 169 - DNA, 42 bp, Artificial Sequence
  Description of Artificial Sequence: Synthetic oligonucleotide
gcattacgctgacttgacgggtgaaaaccgttcgcagcctgg

SEQ ID NO: 170 - DNA, 43 bp, Artificial Sequence; identical to SEQ ID NO: 168
  Description of Artificial Sequence: Synthetic oligonucleotide

SEQ ID NO: 171 - DNA, 42 bp, Artificial Sequence
  Description of Artificial Sequence: Synthetic oligonucleotide
ccaggctgcgaacggttttcacccgtcaagtcagcgtaatgc

SEQ ID NO: 172 - DNA, 46 bp, Artificial Sequence
  Description of Artificial Sequence: Synthetic oligonucleotide
ggcttaccagcaccggtgggttatgtgaaaaccgttcgcagcctgg

SEQ ID NO: 173 - DNA, 46 bp, Artificial Sequence
  Description of Artificial Sequence: Synthetic oligonucleotide
ccaggctgcgaacggttttcacataacccaccggtgctggtaagcc

SEQ ID NO: 174 - DNA, 1317 bp, Artificial Sequence
  Description of Artificial Sequence: Synthetic polynucleotide
atggactggaagaagatctatgaagacagaacctgcactgcagatgaagcagtaaagagcattaagtcaggtgaccgcgtgctgtttgcgcactgtgttgctgaaccgccagttctggtagaagcaatggttgcgaatgcagctgcatacaagaatgtcacggtttcacacatggttacccttggtaagggtgaatactcaaaaccagaatataaagaaaactttacttttgaaggttggtttaccagcccttcaacacgtggatccattgcagaaggacacggacagtttgtccctgtattcttccacgaggtaccatctttaatccgtaaagacattttccatgttgatgtattcatggtaatggtatccccgccagatcataacggtttctgctgtgtgggtgtatcttctgactataccatgcaggctatcaaatcagcaaaaattgtactggctgaagtgaatgatcaggtacctgtagtttatggcgatacctttgttcacgttagtgaaatcgacaagttcgttgaaacttcacatccactgccagaaatcggtctgccgaagatcggtgaagtagaagctgctattggtaagcactgcgcttcgctgatcgaagatggttccacattacagcttggtatcggcgctattccggatgctgtactttcacagcttaaggacaagaaacaccttggtatccactctgaaatgatttccgacggtgttgttgatctttacgaagcaggcgttattgactgcagccaaaagtctatcgacaaaggcaaaatggcaataacattcttaatgggaacgaagcgtctttatgatttcgctgcaaacaatccaaaggttgaattaaagccggttgactacatcaatcatccatctgtagttgcacagtgcagcaaaatggtttgcatcaatgcttgcttgcaagttgattttatgggtcagattgtctccgatagtattggcacaaagcagttctccggcgtaggcggtcaggttgacttcgtacgcggtgcatccatgtctattgacggcaaaggtaaagcgatcatcgcgatgccttccgttgcaaagaagaaagatggcagtatgatttcgaagatcgttccattcatcgatcacggtgcagctgtaactacatcccgtaacgatgcggactatgtcgtaacggaatatggtattgctgaaatgaagggtaagtcgttacaggaccgcgcacgcgcgttaatcaatattgcccaccctgatttcaaagatgaattaaaggctgaatttgaaaagcgcttcaacgcggcattctaa

SEQ ID NO: 175 - DNA, 1308 bp, Artificial Sequence
  Description of Artificial Sequence: Synthetic polynucleotide
atgagctggcaagaactgtatcaaagtaaattatgttcagccacagaagcggtaaaacagattaaaaacggtgataccgtggtatttgcccattgtgtaggtgaaccgcctgcactggtggaggcgatgattgaaaatgctgaacaatataaagatgttgagattaaacatatggttagcctgggtagtggtggttatactgcgaaagggatggaagcgcattttcgcgtaaatccaatgtttgtcagcggcaatgtacgtaaggcgattgaaaatggcgatggtgattttacacctgcattcttccatgaagtaccaaagttgctgcgtgaaaaacgtctgaaatgtgatgttgttctggcacaggtaacgccaccagatgaacatggttattgttcgctgggaacaagcgttgattatacctatgaagccattaaaaccgcgcgcaccgtaattgttcaggtgaatgaccagtttcctcgcacctatggtgaggtggtgcatgtcagcgagtttgactatatcgttgaaaaatcacaaccgctgtttgaactgcaacctgcaaagattggcgaagttgaagaagcgattggtaaaaattgtgcctcgctgattgaagatggtagcacgttacagctggggattggtgggattccggatgcggtgatgttatttctgactgataaaaaagatttagggattcatagcgaaatgattagcgatggcacgctggcgctttatgaaaaaggtgttattaatggtaaatataaaaattttgataaagaaaaaatgacggttaccttcctgatgggtactaaaaaactgtatgactttgccaataataacccggcagtagaggtaaaaccggtagactatgtgaatcatccggcaattatcatgaaacaacataagatggtttctattaatagcgccattcaggttgatttaatggggcaggtggttgcagaggcgatgggactgcgccaattttccggtgttggcggtcaggttgactttattcgtggcgtgtcgatgggtgaagatggcaaggcgattatcgcgatgccttcaatcactacaaaaaaagatggtacggtaattagcaaaatcgtctctattgtcgatgaaggtgcaccgattaccacctcacgtaatgatgttgattatattgtcacagaatacggtattgcagaattaaaaggcaaatcgctgcgtgaacgcgcacgtaatctgattaatattgctcatccatcggtacgtgaatcgctggcagtagaatttgaaaagcgctttaaagagaaatattaa

SEQ ID NO: 176 - DNA, 1539 bp, Artificial Sequence
  Description of Artificial Sequence: Synthetic polynucleotide
atggatttgaagctgaccgatgcggacgttgaggcaatcgtagcgcaagtcatggctaacattgagcgccgtctgggtagcgcggaagcgggcagcgcagcatccgctgcgtcgccggcaccggctgcgccggttcgtaccgctccgggtggcagcccggcagccagcccgcgtccggagtacggtgtttttgatcgtgcggaggatgcagtcgccgctgccgccgaagctcaggaagccttcctgcgccagtgtcgtctgcaagaccgtgagcgcattctgcgtgccatccgtgaagagactctggcacgcaaggaagaattggcacgcctgatttgggaggaaacgaagctgggtcgcttggaacacaaaattgcaaagctggaattgacggcgctgaaaaccccgggtacggaggatctgcgcaccgaggcatttagcggcgacaacggcctgaccatcgtcgaacatgcgccgtacggtgtgattggcgcggttaccccggttacgaaccctgcggagactattatcaacaacgcgatcggcatgctggcaagcggtaatgcagtggtgttcaacgtgcaccctagcgctaaacgttgctccgcgtataccgtccagatgatcaataaagcagtgatggcagcgggtggtccgccgaatctggttacgatggttcgcgagccgaccatggaaaccctgaatgcgatcatccgcagcccgagcgtgaagctgctggtgggcaccggcggtccgggtctggttagcaccctgctgcgctctggtaagaaagcgattggtgcgggtgcgggcaatccgccggtcgttgtggatgataccgccgacctggagcatgcggcaaaggaaatcatcaaaggcgcgtcctttgacaacaatattctgtgtattgcggagaaagaggtttttgtggttgataaagcggccgacggtctgatctatcacatgctggataacggcgcatacatgctgggtcgtgacgagctggagaaggtgatgcaattcgcgctgaccgcggacgaaagccagggcggtgcgggttgctctattgatccgcgtcgtgcgtggcatgtgactaaggagtgggtgggcaaagatgcgcgcttgttcctggagaagattggtgtcaagactgaccgtccggttgacttgctgttgtgcgaggttgactttgaccacccgttcgtgcagctggaacaaatgatgccagtactgccgattgttcgtgtccgtgacctggatgaagccatcggtatggccgtccgtgcggagcacggcaatcgtcacaccgcaattatgcatagccgtaacgtggacaatctgacccgttttgcccgtgccattgccacgaccatcttcgtcaaaaacgcaagcagcttggcgggtgttggttatggcggtgaaggttttaccaccatgacgatcgccggtccaacgggcgagggtctgacgtcggctcgtacgttcacgcgcaaagtccgctgtgtcctggcggacggcggtttccgtatcgttggttaa

SEQ ID NO: 177 - DNA, 792 bp, Yersinia intermedia
atgaccgatattcgcttgtatatgtttcaaactggctcgctgaagtgcaaagtccacaatatcaaaatgaatcaaggaggtggagcggattatgaaatccctgtcccgttcttcctgctgacccatcctgatggtcacacgctgattgatggcgggaatgctgtcgaaaccgccactgatcccaaagggtattggggcgggattaccgaggtttattggccggtaatgcgtgaagatgagggctgtgtagcgcagcttaaaaaaatggggatcaatcccgaagatatccggtatgtcttgcagtcgcacttgcatcttgatcataccggtgcgattggccgattccccaatgcgacacacatcgttcagcgccgtgagtacgagtatgcctttactcctgactggtttgctgcgggaggctatatcagaaacgactttgaccggccgggtctgaaatgggcgtttctggaaggcgaaaacaatgatttttatgatatctatggcgacggtacgctgaaaacagtatttacacccggccattcgcctgggcatcagtcaatactggtcaccttgcccaactcaggtccgatgctactgactattgatgcagcatacaccacggatcactgggaagaaaaagctctgccaggatttatgtcctcagccgttgagacggtgcgttcggtgcagaagatgcgcatgttggctagccgcacaagtgcgcaagtggtgacaggccatgacccggatgcctggcaaacgttcaggcacgcgcctgaatactacgattga

SEQ ID NO: 178 - DNA, 771 bp, Agrobacterium tumefaciens
atgcttcagtcgggtacgctgaaatgcaaggtacacaacattaagatgaaccaggggaacggtgcagactatgagatccccgttccgtttttcctgattacccatccggccgggcacaccgtgatcgacggcggcaacgcgattgaagttgcaacagatccgcgtggccattggggcggcatctgcgatgtctattggccagtactggacaaggaccagggctgcgttgaccagatcaaggcgcttggtttcgatccggccgatgtcaaatatgttgtgcagtcgcacctgcatctcgatcataccggcgccatcggtcgcttccccaacgcaacccacatcgtgcagcgctctgaatatgaatatgcctttacgcccgactggtttgctggcggcggctatatccgcaaggacttcgacaagccgggtctgaagtggcagttcctcaacggtgcgcaggacgattattacgatgtttacggcgacggcacgctcaccacgatcttcacgcccggtcatgcgcccggccaccagtccttcctggtgcgcctgccaaacagcaaaccgcttctcctgacgatcgatgctgcctacacactggaccactgggaagagaaggctttgcctggcttccttgcctcgaccgttgacacggtccgttctgttcagaagctccgcacctatgccgaaaagcatgatgcgacagtcgtcaccggccatgaccctgacgcctgggcgaacttcaagaaggctcccgaattttacgcgtaa

SEQ ID NO: 179 - protein, 263 aa, Yersinia intermedia
MTDIRLYMFQTGSLKCKVHNIKMNQGGGADYEIPVPFFLLTHPDGHTLIDGGNAVETATDPKGYWGGITEVYWPVMREDEGCVAQLKKMGINPEDIRYVLQSHLHLDHTGAIGRFPNATHIVQRREYEYAFTPDWFAAGGYIRNDFDRPGLKWAFLEGENNDFYDIYGDGTLKTVFTPGHSPGHQSILVTLPNSGPMLLTIDAAYTTDHWEEKALPGFMSSAVETVRSVQKMRMLASRTSAQVVTGHDPDAWQTFRHAPEYYD

SEQ ID NO: 180 - protein, 256 aa, Agrobacterium tumefaciens
MLQSGTLKCKVHNIKMNQGNGADYEIPVPFFLITHPAGHTVIDGGNAIEVATDPRGHWGGICDVYWPVLDKDQGCVDQIKALGFDPADVKYVVQSHLHLDHTGAIGRFPNATHIVQRSEYEYAFTPDWFAGGGYIRKDFDKPGLKWQFLNGAQDDYYDVYGDGTLTTIFTPGHAPGHQSFLVRLPNSKPLLLTIDAAYTLDHWEEKALPGFLASTVDTVRSVQKLRTYAEKHDATVVTGHDPDAWANFKKAPEFYA

SEQ ID NO: 181 - protein, 8 aa, Artificial Sequence
  Description of Artificial Sequence: Synthetic peptide
EGYDVFEA

SEQ ID NO: 182 - DNA, 69 bp, Artificial Sequence
  Description of Artificial Sequence: Synthetic primer
atgatgttttcgaagcggaaggctatgatgttttcgaagcgacagatggcgcggaaatgcatcagatcc

SEQ ID NO: 183 - DNA, 71 bp, Artificial Sequence
  Description of Artificial Sequence: Synthetic primer
tttccgcgccatctgtcgcttcgaaaacatcatagccttccgcttcgaaaacatcatagccttccgcttcg

SEQ ID NO: 184 - DNA, 24 bp, Artificial Sequence
  Description of Artificial Sequence: Synthetic primer
taatgatatttcgcccgactgcgc

SEQ ID NO: 185 - DNA, 26 bp, Artificial Sequence
  Description of Artificial Sequence: Synthetic primer
aatgaacggtatttatttgcaagcgg

SEQ ID NO: 186 - DNA, 1963 bp, Artificial Sequence
  Description of Artificial Sequence: Synthetic polynucleotide
taatgatatttcgcccgactgcgcgcagtggtggcgacagtgaaatcgacatcgtgtaacgattcagccaatgtcgggaaaactttaatattatcaataatatcaccagatccatgtgcgacccagcgggtggctggctccaggtgtgcctgactatcgacaatccgcagatcgctaaaccccatcgttttcattgcccgcgccgctgccccaatattttctgctctggcgggtgcgaccagaataatcgttatacgcatattgccactcttcttgatcaaataaccgcgaaccgggtgatcactgtcaacttattacgcggtgcgaatttacaaattcttaacgtaagtcgcagaaaaagccctttacttagcttaaaaaaggctaaactatttcctgactgtactaacggttgagttgttaaaaaatgctacatatccttctgtttacttaggataattttataaaaaataaatctcgacaattggattcaccacgtttattagttgtatgatgcaactagttggattattaaaataatgtgacgaaagctagcatttagatacgatgatttcatcaaactgttaacgtgctacaattgaacttgatatatgtcaacgaagcgtagttttattgggtgtccggcccctcttagcctgttatgttgctgttaaaatggttaggatgacagccgtttttgacactgtcgggtcctgagggaaagtacccacgaccaagctaatgatgttgttgacgttgatggaaagtgcatcaagaacgcaattacgtactttagtcatgttacgccgatcatgttaatttgcagcatgcatcagcaggtcagggacttttgtacttcctgtttcgatttagttggcaatttaggtagcaaacatgcagaccccgcacattcttatcgttgaagacgagttggtaacacgcaacacgttgaaaagtattttcgaagcggaaggctatgatgttttcgaagcggaaggctatgatgttttcgaagcgacagatggcgcggaaatgcatcagatcctctctgaatatgacatcaacctggtgatcatggatatcaatctgccgggtaagaacggtcttctgttagcgcgtgaactgcgcgagcaggcgaatgttgcgttgatgttcctgactggccgtgacaacgaagtcgataaaattctcggcctcgaaatcggtgcagatgactacatcaccaaaccgttcaacccgcgtgaactgacgattcgtgcacgcaacctactgtcccgtaccatgaatctgggtactgtcagcgaagaacgtcgtagcgttgaaagctacaagttcaatggttgggaactggacatcaacagccgttcgttgatcggccctgatggcgagcagtacaagctgccgcgcagcgagttccgcgccatgcttcacttctgtgaaaacccaggcaaaattcagtcccgtgctgaactgctgaagaaaatgaccggccgtgagctgaaaccgcacgaccgtactgtagacgtgacgatccgccgtattcgtaaacatttcgaatctacgccggatacgccggaaatcatcgccaccattcacggtgaaggttatcgcttctgcggtgatctggaagattaatcggctttaccaccgtcaaaaaaaacggcgctttttagcgccgtttttatttttcaaccttatttccagatacgtaactcatcgtccgttgtaacttctttactggctttcattttcggcagtgaaaacgcataccagtcgatattacgggtcacaaacatcatgccggccagcgccaccaccagcacactggttcccaacaacagcgcgctatcggcagagttgagcagtccccacatcacaccatccagcaacaacagcgcgagggtaaacaacatgctgttgcaccaacctttcaataccgcttgcaaataaataccgttcatta

SEQ ID NO: 187 - DNA, 498 bp, Artificial Sequence
  Description of Artificial Sequence: Synthetic polynucleotide
atgggtttgttcgataaactgaaatctctggtttccgacgacaagaaggataccggaactattgagatcattgctccgctctctggcgagatcgtcaatatcgaagacgtgccggatgtcgtttttgcggaaaaaatcgttggtgatggtattgctatcaaaccaacgggtaacaaaatggtcgcgccagtagacggcaccattggtaaaatctttgaaaccaaccacgcattctctatcgaatctgatagcggcgttgaactgttcgtccacttcggtatcgacaccgttgaactgaaaggcgaaggcttcaagcgtattgctgaagaaggtcagcgcgtgaaagttggcgatactgtcattgaatttgatctgccgctgctggaagagaaagccaagtctaccctgactccggttgttatctccaacatggacgaaatcaaagaactgatcaaactgtccggtagcgtaaccgtgggtgaaacccataagcgctaa

SEQ ID NO: 188 - protein, 431 aa, Porphyromonas gingivalis
MQWQELYRQRVCSADEAVVDSLKPGTKVVFGHAAAAPVRFSQAMYRQREKLENITVFHMLYFGDAPHLAPEMRSHVHPTLNFLEGNSRPASRDRRVDFIPCHFHEVPELFRQGFFPLDVAVVQVSTPNEEGYCSFGVSCDYTKAAAECAPVVVAEVNKQMPFIGGENLIHISKLTHIIEVDEPIAEVLPPAISDLELRIGQNCASLIKDGDTLQLGIGGIPDAVLRALEGHKDLGIHTEMFTDGVMRMIRKGIINGKKKTLHPEKVVTSLIFGSKELYDFVNNNPVIECYPVDYINNPDVIGKNDRMVSINSCLEMDLMGQAASESIGYEQFSGSGGQVDFLRGAKRSKGGISIMAFPSTAKKGTESRIVPILKEGACVTTGRNEVDYVVTEYGVARLRGATLRQRAEALTAIAHPDFRPALEEEIRRRFE

SEQ ID NO: 189 - protein, 431 aa, Roseiflexus castenholzii
MPRSLTAGRREMTAEEAVELIESNHRVYIGGGCGVPIPLLDALVARAPELRNVEIIHMLTAGEDPTTAPELAASFRHNALFIGHNTRRAVNEGRADFTPIFLGEIPKLFRQGILPLDVAMIQVSPPDRHGFCSLGVEVGCTLPAARTAKIVIAEVNARMPRTLGDSFIHISRLTALVESDRPLLELPQGETNSVAQAIGRHIAELIPDGATLQLGIGAIPDAVLSNLHGKRHLGIHTELFSDGVIDLVEAGVIDGELKTIHQGKVVAGFILGSQRCFDWAHNNAMVEMHPTDYVNDPFVIAQHKNMVAVNSALQVDLTGQVCADSIGTRLYSGVGGQVDFIRGASRSEGGIPIIAISSTARDGTISRIVPTLDVGAGVVTSRYDVHFVVTEYGVADLYGRTLAQRARALINIAHPAFRDQLTEAAKKLHYI

SEQ ID NO: 190 - protein, 436 aa, Lachnospiraceae bacterium
MNWQEEYKRRLCSAEEAVQHIHSGDTVFLGHAVAESSLLVDAMVQNATAYQDVRIIHMTNLGSGAYTQPGMESHFHVSPFFLGATVRAAVAEGRGDFIPCFFHEIPQLIRERRVPCDVLMTQVSPSDEKGYCSLGVSADYTYQALKSARTVIAHVNDQYPYTFGTKVHVTELDYIVEQSAPLYESKPPKIGEVEEKIGRCCASLIRDGATLQLGIGAIPDAVMMFLGDKHDLGIHSEMISDGTMELYQKGVITNQRKNLDRGKMTITFAMGTKKLYQFLDKNPDVLVKPVDYVNHPVTIMKEHDMISINSAIQVDLQGQVDAEAIGLRQFSGVGGQVDFIRGAAMGGGTSIIAMPSTTQKKDGTLISKIVPFLDQGAPVTTSRNDVDYIITEYGIAHLKGETLRDRAWALISISHPSVRDSLAEEFERRFHQNYRA

SEQ ID NO: 191 - protein, 436 aa, Fusobacterium necrophorum
MSKNWREVYKDKIVTADEAVKQIKSGDRLIFSHACGEAQEITDALLRNKESYEKVEIIHLVPMGKGEYAQEENQKYFYHNSFFGGGSTRKAINGTYGDFTPSFFFEIPNLFRKNGKLPLDVAIIQVSAPDEHGYCSYGISCDYTKGAAENAKIVIAQVNKYMPRTLGENFTHLSAIDSIVEYDQPILQLNPPKIGEVEKKIGEYCAGLIQDGDTLQLGIGAIPDAVLTFLKEKKHLGIHSEMISDGVVDLILAGVIDNSQKTIHKNKCIVSFLMGSQKLYDYVHNNPGVELYPVDYVNHPFVIAQNDNMVSINSALQVDLMGQVNAESMGAKQFSGTGGQVDFVRGAAMSKGGRSIIAMPSTAAKGTISKIVMNLDVGATVTTSRNDVDYIITEYGIAELKGKTLRERAKALIAIAHPDFREQLTKQALEKFQRLE

SEQ ID NO: 192 - protein, 429 aa, Clostridium kluyveri
MEWEEIYKEKLVTAEKAVSKIENHSRVVFAHAVGEPVDLVNALVKNKDNYIGLEIVHMVAMGKGVYTKEGMQRHFRHNALFVGGSTRDAVNSGRAVYTPCFFYEVPSLFKEKRLPVDVALIQVSEPDKYGYCSFGVSNDYTKPAAESAKLVIAEVNKNMPRTLGDSFIHVSDIDYIVEASHPLLELQPPKLGDVEKAIGENCASLIEDGATLQLGIGAIPDAVLLFLKNKKNLGIHSEMISDGVMELVKAGVINNKKKTLHPGKIVVTFLMGTKKLYDFVNNNPMVETYSVDYVNNPLVIMKNDNMVSINSCVQVDLMGQVCSESIGLKQISGVGGQVDFIRGANLSKGGKAIIAIPSTAGKGKVSRITPLLDTGAAVTTSRNEVDYVVTEYGVAHLKGKTLRNRARALINIAHPKFRESLMNEFKKRF

SEQ ID NO: 193 - protein, 436 aa, Clostridium acetobutyricum
MDWKKIYEDRTCTADEAVKSIKSGDRVLFAHCVAEPPVLVEAMVANAAAYKNVTVSQMVTLGKGEYSKPEYKENFTFEGWFTSPSTRGSIAEGHGQFVPVFFHEVPSLIRKDIFHVDVFMMVSPPDHNGFCCVGVSSDYTMQAIKSAKIVLAEVNDQVPVVYGDTFVHVSEIDKFVETSHPLPEIGLPKIGEVEAAIGKHCASLIEDGSTLQLGIGAIPDAVLSQLKDKRHLGIHSEMISDGVVDLYEAGVIDCSQKSIDKGKMAITFLMGTKRLYDFAANNPKVELKPVDYINHPSVVAQCSKMVCINSCLQVDFMGQIVSDSIGTKQYSGVGGQVDFVRGASMSIDGKGKAIIAMPSVAKKKDGSMISKIVPFIDHGAAVTTSRNDADYVVTEYGIAMKGKSLQDRARALINIAHPDFKDELKAEFEKRFNAAF

SEQ ID NO: 194 - protein, 436 aa, Clostridium beijerinckii
MSKISWKDLYKSKVVTADEAVRKIKSNDRVVTGHACGEPKEIIDAMVRNKDLYENVEIVHMVSMGKSEYCKPEMAVNFRHNSIFAGGTTREAIFDGRADFTPCFFSEVPKMFREGTLPVDVALVQLSVPDEHGYCSFGVSNDYTKPAAEAAKIVIAELNEKMPRTLGDSFIHVSDIDYIVETSNDIIELKPPKIGEVEKAIGENCAKLIEDGSTLQLGIGAIPDAVLLFLKGKKDLGIHSEMISDGVVELIEAGVITNKAKTLHPGKSVVTFLMGTKRLYDYVNGNPSVAMYPVDYVNNPCVIAENYKMVSINSCIQVDLMGQVAADTIGLKQFSGVGGQVDFVRGAAMAKGGKSIIAMPSTASKGKLSRIVPILDEGATVTTSRNDIHYVVTEFGIAELKGKTLKERAKALINVAHPDFRDALIKEWEKRFKVKF

SEQ ID NO: 195 - protein, 438 aa, Eubacterium saphenum
MDWKKIYEEKRCTAKEAVQSIKSNDRVVFAHAVAEPTSLVDAMVENKEAYENVTISHMFSFGKGEYSLPENSKHFRYEGWFNSPNTRKSTELGHGDYVPAFFHQVPSLIRRGVLPVDVVMVSLSKPDAHGYCSTGVSSDYTMQAIKSAKVVLAEINDQVPKTFGESFVHISEIDKLVEHSHPLFELGLPKIGEVEEAIGKHCASLIEDGATLQLGIGAIPDAVLAQLKHKKDLGIHSEMISDGAVELFEAGVINNSKKSIDKGKMVVTFLMGTKRLYDFVNENPAVELRPVDYVNHPEVIAKSSNLVCINACLQVDFMGQVVSDTIGTRQFSGVGGQVDFVRGAAMAHDEKAKAIIAMPSVAVKKDGTKISKIVPFIDHGAAVTTSRHDTDYIVTEYGIAEMVGKTMKDRARSLINIAHPDFRDELKAEFEKRFNVKF

SEQ ID NO: 196 - protein, 433 aa, Clostridium sp.
MSWQELYQQKRMTAEQAVSHIKSGDRVVVAHATGEPSALIDAMVKNADAYRNVEIVHMVAMGKGEYCLPEYTENFRHNSLFLGASTRDAIAKGRGDFTPVYFSQIPDLLREELHPNVALLHLSPPDEHGYCSYGVSVDYTKPAAEIADLRIAQINPNMPRTLGDSFIHVSELDCIVEVDDPIIELGQAKIGETECAIGEHCASLIQDGDCLQLGIGAIPDAVLLFLKEKKDLGIHSEMFSDGVVELVEAGVITNRRKTLHKGQCVVTFLMGSKRLYDYVNNNPSVAMYPVDYVNNPAVIAKNDNLVSINSCIQVDLMGQVVSDSIGPRQFSGVGGQVDFVRGANLSRGGKSIMAMPSSLVKKDGTRVSKIAVQIDAGAAVTTSRYDVNYIVTEFGVAKLKGKTLRDRAKALIEIAHPDFREELMEEFHRRFGV

SEQ ID NO: 197 - protein, 438 aa, Clostridium aminobutyricum
MDWKKIYEDRTCTADEAVKSIKSGDRVLFAHCVAEPPVLVEAMVANAAAYKNVTVSHMVTLGKGEYSKPEYKENFTFEGWFTSPSTRGSIAEGHGQFVPVFFHEVPSLIRKDIFHVDVFMVMVSPPDHNGFCCVGVSSDYTMQAIKSAKIVLAEVNDQVPVVYGDTFVHVSEIDKFVETSHPLPEIGLPKIGEVEAAIGKHCASLIEDGSTLQLGIGAIPDAVLSQLKDKKHLGIHSEMISDGVVDLYEAGVIDCSQKSIDKGKMAITFLMGTKRLYDFAANNPKVELKPVDYINHPSVVAQCSKMVCINACLQVDFMGQIVSDSIGTKQFSGVGGQVDFVRGASMSIDGKGKAIIAMPSVAKKKDGSMISKIVPFIDHGAAVTTSRNDADYVVTEYGIAEMKGKSLQDRARALINIAHPDFKDELKAEFEKRFNAAF

SEQ ID NO: 198 - protein, 433 aa, Clostridium carboxidivorans
MDWKKLYKSKLVSAKEAVSNIKSNSRVVVSIAVAEPTELIDALVANKENYENVEVVHMVDMGKSEYAQEGMEKYFKYNSIFVGASTKDAVNSGRSDFTPCCFYELPRLFEEGYLPVDVVLIQVSKPDKHGYCSFGVSNDYTKPAADCAKMVIAEVNENMPRVLGDSFIHISDIDYIVETSHPIMELKQPKIGKIEEAIGEYCASLIEDGSTLQLGIGAIPDAVLLFLKDKKDLGIHSEMISDGVVDLVESGVINNKEKTLNPGKIVVTFFMGTKKLYDFIDDNPMVESYPVSYVNDPTVIMKNSKMISINSCVEVDLMGQVCSESIGMNQISGIGGQVDFIRGANMCKDGKAIIAIPSTAAKGKVSRIVPLIEKGTPITTSRTDVDYIITEYGIARLKSKSLKERARALINIAHPDFRAWLIDEYEKRFKTKF

SEQ ID NO: 199 - protein, 431 aa, Artificial Sequence
  Description of Artificial Sequence: Synthetic polypeptide
MQWQELYRQRVCSADEAVVDSLKPGTKVVLGGAAAAPVRFSQAMYRQREKLENITVFQMLYFGDAPHLAPEMRSHVHPTLNFLEGNSRPASRDRRVDFIPCHFHEVPYLFRQGFFPLDVAVVQVSTPNEEGYCSFGVSCDYTKAAAECAPVVVAEVNKQMPFIGGENLIHISKLTHIIEVDEPIAEVLPPAISDLELRIGQNCASLIKDGDTLQLGIGGIPDAVLRALEGHRDLGIHTEMFTDGVMRMIRKGIINGKKKTLHPEKVVTSLIFGSKELYDFVNNNPVIECYPVDYINNPDVIGKNDRMVSINSCVEMDLMGQAASESIGYEQYSGSGGQVDFLRGAKRSKGGISIMAFPSTAKKGTESRIVPILKEGACVTTGRNEVDYVVTEYGVARLRGATLRQRAEALTAIAHPDFRPALEEEIRRRFE

SEQ ID NO: 200 - protein, 431 aa, Artificial Sequence
  Description of Artificial Sequence: Synthetic polypeptide
MPRSLTAGRREMTAEEAVELIESNHRVYLGHGAGVPIPLLDALVARAPELRNVEIIQMLTAGEDPTTAPELAASFRHNALFIGHNTRRAVNEGRADFTPIFLGEIPYLFRQGILPLDVAMIQVSPPDRHGFCSLGVEVGCTLPAARTAKIVIAEVNARMPRTLGDSFIHISRLTALVESDRPLLELPQGETNSVAQAIGRHIAELIPDGATLQLGIGAIPDAVLSNLHGKRHLGIHTELFSDGVIDLVEAGVIDGELKTIHQGKVVAGFILGSQRCFDWAHNNAMVEMHPTDYVNDPFVIAQHKNMVAVNSAVQVDLTGQVCADSIGTRLYSGVGGQVDFIRGASRSEGGIPIIAISSTARDGTISRIVPTLDVGAGVVTSRYDVHFVVTEYGVADLYGRTLAQRARALINIAHPAFRDQLTEAAKKLHYI

SEQ ID NO: 201 - protein, 436 aa, Artificial Sequence
  Description of Artificial Sequence: Synthetic polypeptide
MNWQEEYKRRLCSAEEAVQHIHSGDTVFLGGAAAESSLLVDAMVQNATAYQDVRIIQMTNLGSGAYTQPGMESHFHVSPFFLGATVRAAVAEGRGDFIPCFFHEIPYLIRERRVPCDVLMTQVSPSDEKGYCSLGVSADYTYQALKSARTVIAHVNDQYPYTFGTKVHVTELDYIVEQSAPLYESKPPKIGEVEEKIGRCCASLIRDGATLQLGIGAIPDAVMMFLGDKRDLGIHSEMISDGTMELYQKGVITNQRKNLDRGKMTITFAMGTKKLYQFLDKNPDVLVKPVDYVNHPVTIMKEHDMISINSAVQVDLQGQVDAEAIGLRQYSGVGGQVDFIRGAAMGGGTSIIAMPSTTQKKDGTLISKIVPFLDQGAPVTTSRNDVDYIITEYGIAHLKGETLRDRAWALISISHPSVRDSLAEEFERRFHQNYRA

SEQ ID NO: 202 - protein, 436 aa, Artificial Sequence
  Description of Artificial Sequence: Synthetic polypeptide
MSKNWREVYKDKIVTADEAVKQIKSGDRLILSGAAGEAQEITDALLRNKESYEKVEIIQLVPMGKGEYAQEENQKYFYHNSFFGGGSTRKAINGTYGDFTPSFFFEIPYLFRKNGKLPLDVAIIQVSAPDEHGYCSYGISCDYTKGAAENAKIVIAQVNKYMPRTLGENFTHLSAIDSIVEYDQPILQLNPPKIGEVEKKIGEYCAGLIQDGDTLQLGIGAIPDAVLTFLKEKRHLGIHSEMISDGVVDLILAGVIDNSQKTIHKNKCIVSFLMGSQKLYDYVHNNPGVELYPVDYVNHPFVIAQNDNMVSINSAVQVDLMGQVNAESMGAKQYSGTGGQVDFVRGAAMSKGGRSIIAMPSTAAKGTISKIVMNLDVGATVTTSRNDVDYIITEYGIAELKGKTLRERAKALIAIAHPDFREQLTKQALEKFQRLE

SEQ ID NO: 203 - protein, 429 aa, Artificial Sequence
  Description of Artificial Sequence: Synthetic polypeptide
MEWEEIYKEKLVTAEKAVSKIENHSRVVLAGAAGEPVDLVNALVKNKDNYIGLEIVQMVAMGKGVYTKEGMQRHFRHNALFVGGSTRDAVNSGRAVYTPCFFYEVPYLFKEKRLPVDVALIQVSEPDKYGYCSFGVSNDYTKPAAESAKLVIAEVNKNMPRTLGDSFIHVSDIDYIVEASHPLLELQPPKLGDVEKAIGENCASLIEDGATLQLGIGAIPDAVLLFLKNKRNLGIHSEMISDGVMELVKAGVINNKKKTLHPGKIVVTFLMGTKKLYDFVNNNPMVETYSVDYVNNPLVIMKNDNMVSINSCVQVDLMGQVCSESIGLKQYSGVGGQVDFIRGANLSKGGKAIIAIPSTAGKGKVSRITPLLDTGAAVTTSRNEVDYVVTEYGVAHLKGKTLRNRARALINIAHPKFRESLMNEFKKRF

SEQ ID NO: 204 - protein, 438 aa, Artificial Sequence
  Description of Artificial Sequence: Synthetic polypeptide
MDWKKIYEDRTCTADEAVKSIKSGDRVLLAGCAAEPPVLVEAMVANAAAYKNVTVSQMVTLGKGEYSKPEYKENFTFEGWFTSPSTRGSIAEGHGQFVPVFFHEVPYLIRKDIFHVDVFMVMVSPPDHNGFCCVGVSSDYTMQAIKSAKIVLAEVNDQVPVVYGDTFVHVSEIDKFVETSHPLPEIGLPKIGEVEAAIGKHCASLIEDGSTLQLGIGAIPDAVLSQLKDKRHLGIHSEMISDGVVDLYEAGVIDCSQKSIDKGKMAITFLMGTKRLYDFAANNPKVELKPVDYINHPSVVAQCSKMVCINSCVQVDFMGQIVSDSIGTKQYSGVGGQVDFVRGASMSIDGKGKAIIAMPSVAKKKDGSMISKIVPFIDHGAAVTTSRNDADYVVTEYGIAEMKGKSLQDRARALINIAHPDFKDELKAEFEKRFNAAF

SEQ ID NO: 205 - protein, 436 aa, Artificial Sequence
  Description of Artificial Sequence: Synthetic polypeptide
MSKISWKDLYKSKVVTADEAVRKIKSNDRVVLGGAAGEPKEIIDAMVRNKDLYENVEIVQMVSMGKSEYCKPEMAVNFRHNSIFAGGTTREAIFDGRADFTPCFFSEVPYMFREGTLPVDVALVQLSVPDEHGYCSFGVSNDYTKPAAEAAKIVIAELNEKMPRTLGDSFIHVSDIDYIVETSNDIIELKPPKIGEVEKAIGENCAKLIEDGSTLQLGIGAIPDAVLLFLKGKRDLGIHSEMISDGVVELIEAGVITNKAKTLHPGKSVVTFLMGTKRLYDYVNGNPSVAMYPVDYVNNPCVIAENYKMVSINSCVQVDLMGQVAADTIGLKQYSGVGGQVDFVRGAAMAKGGKSIIAMPSTASKGKLSRIVPILDEGATVTTSRNDIHYVVTEFGIAELKGKTLKERAKALINVAHPDFRDALIKEWEKRFKVKF

SEQ ID NO: 206 - protein, 438 aa, Artificial Sequence
  Description of Artificial Sequence: Synthetic polypeptide
MDWKKIYEEKRCTAKEAVQSIKSNDRVVLAGAAAEPTSLVDAMVENKEAYENVTISQMFSFGKGEYSLPENSKHFRYEGWFNSPNTRKSTELGHGDYVPAFFHQVPYLIRRGVLPVDVVMVSLSKPDAHGYCSTGVSSDYTMQAIKSAKVVLAEINDQVPKTFGESFVHISEIDKLVEHSHPLFELGLPKIGEVEEAIGKHCASLIEDGATLQLGIGAIPDAVLAQLKHKRDLGIHSEMISDGAVELFEAGVINNSKKSIDKGKMVVTFLMGTKRLYDFVNENPAVELRPVDYVNHPEVIAKSSNLVCINSCLQVDFMGQVVSDTIGTRQYSGVGGQVDFVRGAAMAHDEKAKAIIAMPSVAVKKDGTKISKIVPFIDHGAAVTTSRHDTDYIVTEYGIAEMVGKTMKDRARSLINIAHPDFRDELKAEFEKRFNVKF

SEQ ID NO: 207 - protein, 433 aa, Artificial Sequence
  Description of Artificial Sequence: Synthetic polypeptide
MSWQELYQQKRMTAEQAVSHIKSGDRVVLAGAAGEPSALIDAMVKNADAYRNVEIVQMVAMGKGEYCLPEYTENFRHNSLFLGASTRDAIAKGRGDFTPVYFSQIPYLLREELHPNVALLHLSPPDEHGYCSYGVSVDYTKPAAEIADLRIAQINPNMPRTLGDSFIHVSELDCIVEVDDPIIELGQAKIGETECAIGEHCASLIQDGDCLQLGIGAIPDAVLLFLKEKRDLGIHSEMFSDGVVELVEAGVITNRRKTLHKGQCVVTFLMGSKRLYDYVNNNPSVAMYPVDYVNNPAVIAKNDNLVSINSCVQVDLMGQVVSDSIGPRQYSGVGGQVDFVRGANLSRGGKSIMAMPSSLVKKDGTRVSKIAVQIDAGAAVTTSRYDVNYIVTEFGVAKLKGKTLRDRAKALIEIAHPDFREELMEEFHRRFGV

SEQ ID NO: 208 - protein, 438 aa, Artificial Sequence
  Description of Artificial Sequence: Synthetic polypeptide
MDWKKIYEDRTCTADEAVKSIKSGDRVLLAGCAAEPPVLVEAMVANAAAYKNVTVSQMVTLGKGEYSKPEYKENFTFEGWFTSPSTRGSIAEGHGQFVPVFFHEVPYLIRKDIFHVDVFMVMVSPPDHNGFCCVGVSSDYTMQAIKSAKIVLAEVNDQVPVVYGDTFVHVSEIDKFVETSHPLPEIGLPKIGEVEAAIGKHCASLIEDGSTLQLGIGAIPDAVLSQLKDKRHLGIHSEMISDGVVDLYEAGVIDCSQKSIDKGKMAITFLMGTKRLYDFAANNPKVELKPVDYINHPSVVAQCSKMVCINSCVQVDFMGQIVSDSIGTKQFSGVGGQVDFVRGASMSIDGKGKAIIAMPSVAKKKDGSMISKIVPFIDHGAAVTTSRNDADYVVTEYGIAEMKGKSLQDRARALINIAHPDFKDELKAEFEKRFNAAF

SEQ ID NO: 209 - protein, 433 aa, Artificial Sequence
  Description of Artificial Sequence: Synthetic polypeptide
MDWKKLYKSKLVSAKEAVSNIKSNSRVVVSIAAAEPTELIDALVANKENYENVEVVQMVDMGKSEYAQEGMEKYFKYNSIFVGASTKDAVNSGRSDFTPCCFYELPRLFEEGYLPVDVVLIQVSKPDKHGYCSFGVSNDYTKPAADCAKMVIAEVNENMPRVLGDSFIHISDIDYIVETSHPIMELKQPKIGKIEEAIGEYCASLIEDGSTLQLGIGAIPDAVLLFLKDKRDLGIHSEMISDGVVDLVESGVINNKEKTLNPGKIVVTFFMGTKKLYDFIDDNPMVESYPVSYVNDPTVIMKNSKMISINSCVEVDLMGQVCSESIGMNQISGIGGQVDFIRGANMCKDGKAIIAIPSTAAKGKVSRIVPLIEKGTPITTSRTDVDYIITEYGIARLKSKSLKERARALINIAHPDFRAWLIDEYEKRFKTKF

SEQ ID NO: 210 - protein, 858 aa, Clostridium acetobutylicum
MKVTNQKELKQKLNELREAQKKFATYTQEQVDKIFKQCAIAAAKERINLAKLAVEETGIGLVEDKIIKNHFAAEYIYNKYKNEKTCGIIDHDDSLGITKVAEPIGIVAAIVPTTNPTSTAIFKSLISLKTRNAIFFSPHPRAKKSTIAAAKLILDAAVKAGAPKNIIGWIDEPSIELSQDLMSEADIILATGGPSMVKAAYSSGKPAIGVGAGNTPAIIDESADIDMAVSSIILSKTYDNGVICASEQSILVMNSIYEKVKEEFVKRGSYILNQNEIAKIKETMFKNGAINADIVGKSAYIIAKMAGIEVPQTTKILIGEVQSVEKSELFSHEKLSPVLAMYKVKDFDEALKKAQRLIELGGSGHTSSLYIDSQNNKDKVKEFGLAMKTSRTFINMPSSQGASGDLYNFAIAPSFTLGCGTWGGNSVSQNVEPKHLLNIKSVAERRENMLWFKVPQKIYFKYGCLRFALKELKDMNKKRAFIVTDKDLFKLGYVNKITKVLDEIDIKYSIFTDIKSDPTIDSVKKGAKEMLNFEPDTIISIGGGSPMDAAKVMHLLYEYPEAEIENLAINFMDIRKRICNFPKLGTKAISVAIPTTAGTGSEATPFAVITNDETGMKYPLTSYELTPNMAIIDTELMLNMPRKLTAATGIDALVHAIEAYVSVMATDYTDELALRAIKMIFKYLPRAYKNGTNDIEAREKMAHASNIAGMAFANAFLGVCHSMAHKLGAMHHVPHGIACAVLIEEVIKYNATDCPTKQTAFPQYKSPNAKRKYAEIAEYLNLKGTSDTEKVTALIEAISKLKIDLSIPQNISAAGINKKDFYNTLDKMSELAFDDQCTTANPRYPLISELKDIYIKSF

SEQ ID NO: 211 - protein, 389 aa, Clostridium tetani
MKRFTIPRDIYYGKGSLEVIKSIKGNKAVIVIGGGSMKRFGFLDKVENYLKEAGIETKLIEGVEPDPSVETVMKGAEIMREFKPDWIISIGGGSPIDAAKAMWLFYEHPDLTFEEAAQKVLCLPELRSKAKFMAIPSTSGTASEVTAFSVITDYKKQIKYPLADFNLTPDIAIVDPELAETMPAKLTAHTGMDALTHAIEAYVATENTSFTDPLALQAILMVKDYLIKSYEEDKEARERMHEAQCLAGMAFSNALLGITHSMAHKIGAVFDITHGCANAIFLPYVIQFNSKVCEERYANIAKYLGLEGESDKDLVNSLINFIRDLNKKLSIDNSLKEYGIDENEFKEKVEYMAHNAVLDACTGANPRKINEEEMKNMYTYAFNGKDIDF

SEQ ID NO: 212 - protein, 405 aa, Butyrivibrio proteoclasticus
MSRFTLPRDIYHGKGALEALKTLEGKRAIVCVGGSSMKKGGFLQKVEDYLKEAGMEVELFEGIEPDPSVETVMKGAEAMQKFQPDWIVAIGGGSPIDAAKAMWIKYEYPETTFEDMCKVFGLPKLRTKAHFCAIPSTSGTATEVTAFSIITDYQKGIKYPIADFEITPDVAIVDPELTHTMPIKLVAHTGMDAMTHAIEAYVSTANCDYTDGLAIHAIEMIQANLVKSYNGDMESRDAMHNAQCLAGMAFSNALLGIVHSMAHKTGAVFADKGAHIIHGAANAMYLPKVIAFNAKDETAKKRYGVIADYMHLGGSNDDEKVKLLIDYLRKMNDDLNIPHSINHYGADGLPADQGFVAEDVFLERLHDIAANAILDACTGSNPRQPSQEEMEKLLKCCYYDTEVDF

SEQ ID NO: 213 - protein, 391 aa, Anaerostipes caccae
MGRFTLPRDLYFGKGSLETLKTLDGKKAVLVLGGGSMKRFGFVDQVVDYLKEAGIETKLIEGVEPDPSVETVFKGAEVMRDFEPDWIIAMGGGSPIDAAKAMWIFYEHPETTFDDVKDPFTVPPLRNKAKFLAIPSTSGTATEVTAFAVITDYSSGIKYPLADFEITPDIAIVDPALAETMPPKLTSYTGMDALTHAIEAYVAGLHSPFSDPLAMEAIEMVFDNLKASYEGDMTARENMHYAQCLAGMSFSNALLGIVHSLAHKTGAVFDTGHITHGCANAIYLPYVIQFNAKVCEERYAAIARRIGLPGNSDKALTLSLIEAIREMNKKLNIVSNLKDFGINEEEFNQKKRMIAERAVADACTGSNPRETSVDDMEKVLECIYYGKDVTF

SEQ ID NO: 214 - protein, 388 aa, Lachnospiraceae bacterium
MARFTLPRDLYWGKGSLENLKTLQGKKAVLVLGGGSMKRFGFVDKAVSYLKEAGIETRLFENVEPDPSVETVMKGAEFMREFEPDWIIAMGGGSPIDAAKAMWVFYEYPECTFEEILTPFSFPELRKKAKFCAIPSTSGTATEVTAFSVITDYAKGIKYPLADFNITPDVAIVDPELAETMPKHLVAYTGMDALTHAIEAYVSTLHGTFTDPLALKAIQIVNDELTKSYDGDMASREEMHYGQCLAGMAFSNALLGIVHSMAHKTGAAFSTGHITHGLANAMYLPYVIKYNAKEAEAKKRYETIAAYLGLEASVDALCNRIVELNNYMGIPNTLKEFGIKEDEFKEKISEIAKNAVGDACTGSNPRSIDPETMEKLFTYIYDGKEVDF

SEQ ID NO: 215 - protein, 388 aa, Clostridium celatum
MARFTLPRDIYHGNGSLEVLKTLKGKKAVVVVGGGSMKRFGFLEKVENYLKEAGLEVRLIEGVEPDPSVETVMNGAAVMREFEPDWIVAMGGGSPIDAAKAMWIFYEYPDFTFEEAVVPFGLPELRQKAKFVAIPSTSGTATEVTAFSVITDYKAKIKYPLADFNITPDIAIVDPELAQTMPAKLVAHTGMDALTHAIEAYTASLKSNFSDPLALKAIEMINENLVKSFNGDKNARDLMHEAQCLAGMAFSNALLGIVHSMAHKTGAVFHIPHGCANAIFLPYVIQYNRSECEERYADIAKVLKLEGNTNAELTDSLITKINEFNKELNIPATMQEYGVNEEEFLANLKNVAHNAVLDACTGSNPRTIDDETMEKLLSCTFYGNKVDF

SEQ ID NO: 216 - protein, 388 aa, Clostridium carboxidivorans
MSRFTLPRDIYFGENTLETLKTLKGKKAIIVVGGGSMKKFGFLQKVEEYLKEAGMEIKLIEGVEPDPSVETVMKGAEIMRDFEPDWIVSIGGGSPIDAAKAMWIFYEYPEFTFEQAVVPFGIPDLRQKAKFVAIPSTSGTATEVTAFSVITDYKAKIKYPLADFNLTPDVAIIDPALAQTMPAKLTAHTGMDALTHAIEAYVAGLRSYFSDPLAMQAIVMTKDNLIKSYEGDKEARDEMHIAQCLAGMAFSNALLGITHSMAHKTGAVFHIPHGCANAIFLPYVIDFNKKTCKDRYATIAKTLGLAGNTDDELVDALTSMIQEMNKKMDIPLNLKEYGVTEEDFNENLDFIAHNAVLDACTGSNPRPITEEEMKKVFKCTFTGEKVNF

SEQ ID NO: 217 - protein, 388 aa, Clostridium butyricum
MARFTLPRDIYHGEGSLEVLKTLKGKKAFVVVGGGSMKRFGFLQKVENYLKEAGMEVELFEGVEPDPSVETVMKGAEAMRKFQPDWIVAMGGGSPIDAAKAMWIFYEYPDFTFEQAVVPFGLPELRQKAKFVAIPSTSGTATEVTAFSVITNYTEKIKYPLADFNITPDIAIVDPELAQTMPAKLVAHTGMDALTHAIEAYTASLRSNFSDPLAIKAIEMVNENLVKSFEGDKTARNLMHEAQCLAGMAFSNALLGIVHSMAHKVGAVFHIPHGCANAIFLPYVIKYNRKVCEDRYADIARALKLEGNTDAELTDSLIKLINEFNDDLSIPHSMKEYGVEEADFKSNVKFIAHNAILDACTGSSPREIDEETMEKLFECTYYGTDVNF

SEQ ID NO: 218 - protein, 388 aa, Clostridium saccharoperbutylacetonicum
MARFTLPRDLYHGEGALEVLKTLKGKKAFVVVGGGSMKRFGFLQKVENYLKEAGMEVELFEGVEPDPSVETVMKGAEAMRNFEPDWIVSIGGGSPIDAAKAMWIFYEYPDFTFEQAVVPFGLPELRQKAKFVAIPSTSGTATEVTAFSVITNYTERIKYPLADFNITPDIAIIDPELAQTMPKTLTAHTGMDALTHAIEAYTASLRSNFSDPLAIKAIEMVNENLFKSYEGDKEARNLMHEAQCLAGMAFSNALLGIVHSMAHKVGAVFHIPHGCANAIFLPYVIQYNRTKCEERYADIARALKLEGNNDAELTDALIARINKLNEKLSIPSSMKEYGVTEEDFKANLSFIAHNAVLDACTGSNPREIDDATMEKLFECTFYGTKVEL

SEQ ID NO: 219 - protein, 388 aa, Clostridium beijerinckii
MARFTLPRDIYHGEGALEALKTLKGKKAFLVVGGGSMKRFGFLKQVEDYLKEAGMEVELFEGVEPDPSVETVMKGAEAMRNFEPDWIVAMGGGSPIDAAKAMWIFYEYPDFTFEQAVVPFGLPDLRQKAKFVAIPSTSGTATEVTAFSVITNYSEKIKYPLADFNITPDIAIVDPALAQTMPKTLTAHTGMDALTHAIEAYTASLQSNFSDPLAIKAVEMVQENLIKSFEGDKEARNLMHEAQCLAGMAFSNALLGIVHSMAHKVGAVFHIPHGCANAIFLPYVIEYNRTKCENRYGDIARALKLKGNNDAELTDSLIELINGLNDKLEIPHSMKEYGVTEEDFKANLSFIAHNAVLDACTGSNPREIDDATMEKLFECTYYGTKVNL

SEQ ID NO: 220 - protein, 393 aa, Bacteroides capillosus
MSRFTLPRDIYYGANALEALKTLKGKKAVMVLGGGSMKRFGFVDKAIGYLKEAGIETKLFENVEPDPSVETVMKGAAMMREFEPDWIISMGGGSPIDAAKAMWAFYEYPETTFEDLITPFNFPELRQKAKFCAIPSTSGTATEVTAFSVITDYAKGIKYPLADFNITPDVAIVDPALAETMPPHLVAYTGMDALTHAIEAYVSTLHTVFTDPLAIEAIHIVEKDLIKSFKGDMTCREEMHYGQCLAGMAFSNALLGIVHSMAHKTGAAFSTGHITHGLANAMYLPYVIAYNSKADGVAERYADIARTMGVVGDTTAELVEGLRAKIRSMNDAMGIPNTLKDFGIIEDEFKEKLEAIATNAVGDACTGSNPRPIDPATMAKLFTCIYYGTEVDF

SEQ ID NO: 221 - protein, 394 aa, Clostridium perfringens
MGGIISMARFTLPRDIYHGKDSLEVLKSLEGKKAFIVIGGGSMKRFGFLDKVLSYLKEANMETKVFEGVEPDPSVETVMKGAKEMEEFNPDWIVSIGGGSPIDAAKAMWIFYEYPDFTFEKAIVPFGLPKLRRKAKFVAIPSTSGTATEVTAFSVITDYKAKIKYPLADFEITPDIAIVDPSLAETMPEKLVAHTGMDALTHAIEAYTASLRSNFTDPLALKAIEMVNMHLVNSFKGDMEARGEMHEAQCLAGMAFSNALLGIVHSMAHKVGAVFHIPHGCANAIFLPYVIKYNRKACEDRYAQIARHIGLKGESERELTDALIDLINKFNKELNIPSSMKEYGIDENEFKTNLKFIAHNAVLDPCTGSNPREIDDETMEKLYTCAYYGSDVDF

SEQ ID NO: 222 - protein, 858 aa, Artificial Sequence
  Description of Artificial Sequence: Synthetic polypeptide
MKVTNQKELKQKLNELREAQKKFATYTQEQVDKIFKQCAIAAAKERINLAKLAVEETGIGLVEDKIIKNHFAAEYIYNKYKNEKTCGIIDHDDSLGITKVAEPIGIVAAIVPTTNPTSTAIFKSLISLKTRNAIFFSPHPRAKKSTIAAAKLILDAAVKAGAPKNIIGWIDEPSIELSQDLMSEADIILATGGPSMVKAAYSSGKPAIGVGAGNTPAIIDESADIDMAVSSIILSKTYDNGVICASEQSILVMNSIYEKVKEEFVKRGSYILNQNEIAKIKETMFKNGAINADIVGKSAYIIAKMAGIEVPQTTKILIGEVQSVEKSELFSHEKLSPVLAMYKVKDFDEALKKAQRLIELGGSGHTSSLYIDSQNNKDKVKEFGLAMKTSRTFINMPSSQGASGDLYNFAIAPSFTLGCGTWGGNSVSQNVEPKHLLNIKSVAERRENMLWFKVPQKIYFKYGCLRFALKELKDMNKKRAFIVTDKDLFKLGYVNKITKVLDEIDIKYSIFTDIKSDPTIDSVKKGAKEMLNFEPDTIISIGGGSPMDAAKVMHLLYEYPEAEIENLAINFMDIRKRICNFPKLGTKAISVDIPTTAGTGSEATPFAVITNDETGMKYGLTSYELTPNMAIIDTELMLNMPRKLTAAVGIDAFVHAIETYVSVMATDYTDELALRAIKMIFKYLPRAYKNGTNDIEAREKMAHASNIAGMAFANAFLGVCHSMAHQLGPMHHVPHGIACAVLIEEVIKYNATDCPTKQTAFPQYKSPNAKRKYAEIAEYLNLKGTSDTEKVTALIEAISKLKIDLSIPQNISAAGINKKDFYNTLDKMSELAFDDQSTTANPRYPLISELKDIYIKSF

SEQ ID NO: 223 - protein, 389 aa, Artificial Sequence
  Description of Artificial Sequence: Synthetic polypeptide
MKRFTIPRDIYYGKGSLEVIKSIKGNKAVIVIGHASMKRFGFLDKVENYLKEAGIETKLIEGVEPDPSVETVMKGAEIMREFKPDWIISIGGGSPIDAAKAMWLFYEHPDLTFEEAAQKVLCLPELRHKAKFMDIPSTSGTASEVTAFSVITDYKKQIKYGLADFNLTPDIAIVDPELAETMPAKLTAHVGMDALTHAIETYVATERTSFTDPLALQAILMVHDYLIKSYEEDKEARERMHEAQCLAGMAFSNALLGITHSMAHQIGPVFDITHGCATAIFLPYVIQFNSKVCEERYANIAKYLGLEGESDKDLVNSLINFIRDLNKKLSIDNSLKEYGIDENEFKEKVEYMAHNAVLDACTGANPRKINEEEMKNMYTYAFNGKDIDF

SEQ ID NO: 224 - protein, 405 aa, Artificial Sequence
  Description of Artificial Sequence: Synthetic polypeptide
MSRFTLPRDIYHGKGALEALKTLEGKRAIVCVGHASMKKGGFLQKVEDYLKEAGMEVELFEGIEPDPSVETVMKGAEAMQKFQPDWIVAIGGGSPIDAAKAMWIKYEYPETTFEDMCKVFGLPKLRHKAHFCDIPSTSGTATEVTAFSIITDYQKGIKYGIADFEITPDVAIVDPELTHTMPIKLVAHVGMDAFTHAIETYVSTARCDYTDGLAIHAIEMIHANLVKSYNGDMESRDAMHNAQCLAGMAFSNALLGIVHSMAHQTGPVFADKGAHIIHGAATAMYLPKVIAFNAKDETAKKRYGVIADYMHLGGSNDDEKVKLLIDYLRKMNDDLNIPHSLNHYGADGLPADQGFVAEDVFLERLHDIAANAILDACTGSNPRQPSQEEMEKLLKCCYYDTEVDF

SEQ ID NO: 225 - protein, 391 aa, Artificial Sequence
  Description of Artificial Sequence: Synthetic polypeptide
MGRFTLPRDLYFGKGSLETLKTLDGKKAVLVLGHASMKRFGFVDQVVDYLKEAGIETKLIEGVEPDPSVETVFKGAEVMRDFEPDWIIAMGGGSPIDAAKAMWIFYEHPETTFDDVKDPFTVPPLRHKAKFLDIPSTSGTATEVTAFAVITDYSSGIKYGLADFEITPDIAIVDPALAETMPPKLTSYVGMDAFTHAIETYVAGLRSPFSDPLAMEAIEMVHDNLKASYEGDMTARENMHYAQCLAGMSFSNALLGIVHSLAHQTGPVFDTGHITHGCATAIYLPYVIQFNAKVCEERYAAIARRIGLPGNSDKALTLSLIEAIREMNKKLNIVSNLKDFGINEEEFNQKKRMIAERAVADASTGSNPRETSVDDMEKVLECIYYGKDVTF

SEQ ID NO: 226 - protein, 388 aa, Artificial Sequence
  Description of Artificial Sequence: Synthetic polypeptide
MARFTLPRDLYWGKGSLENLKTLQGKKAVLVLGHASMKRFGFVDKAVSYLKEAGIETRLFENVEPDPSVETVMKGAEFMREFEPDWIIAMGGGSPIDAAKAMWVFYEYPECTFEEILTPFSFPELRHKAKFCDIPSTSGTATEVTAFSVITDYAKGIKYGLADFNITPDVAIVDPELAETMPKHLVAYVGMDALTHAIETYVSTLRGTFTDPLALKAIQIVHDELTKSYDGDMASREEMHYGQCLAGMAFSNALLGIVHSMAHQTGPAFSTGHITHGLANAMYLPYVIKYNAKEAEAKKRYETIAAYLGLEASVDALCNRIVELNNYMGIPNTLKEFGIKEDEFKEKISEIAKNAVGDASTGSNPRSIDPETMEKLFTYIYDGKEVDF

SEQ ID NO: 227 - protein, 388 aa, Artificial Sequence
  Description of Artificial Sequence: Synthetic polypeptide
MARFTLPRDIYHGNGSLEVLKTLKGKKAVVVVGHASMKRFGFLEKVENYLKEAGLEVRLIEGVEPDPSVETVMNGAAVMREFEPDWIVAMGGGSPIDAAKAMWIFYEYPDFTFEEAVVPFGLPELRHKAKFVDIPSTSGTATEVTAFSVITDYKAKIKYGLADFNITPDIAIVDPELAQTMPAKLVAHVGMDAFTHAIETYTASLRSNFSDPLALKAIEMIHENLVKSFNGDKNARDLMHEAQCLAGMAFSNALLGIVHSMAHQTGPVFHIPHGCATAIFLPYVIQYNRSECEERYADIAKVLKLEGNTNAELTDSLITKINEFNKELNIPATLQEYGVNEEEFLANLKNVAHNAVLDASTGSNPRTIDDETMEKLLSCTFYGNKVDF

SEQ ID NO: 228 - protein, 388 aa, Artificial Sequence
  Description of Artificial Sequence: Synthetic polypeptide
MSRFTLPRDIYFGENTLETLKTLKGKKAIIVVGHASMKKFGFLQKVEEYLKEAGMEIKLIEGVEPDPSVETVMKGAEIMRDFEPDWIVSIGGGSPIDAAKAMWIFYEYPEFTFEQAVVPFGIPDLRHKAKFVDIPSTSGTATEVTAFSVITDYKAKIKYGLADFNLTPDVAIIDPALAQTMPAKLTAHVGMDAFTHAIETYVAGLRSYFSDPLAMQAIVMTHDNLIKSYEGDKEARDEMHIAQCLAGMAFSNALLGITHSMAHQTGPVFHIPHGCATAIFLPYVIDFNKKTCKDRYATIAKTLGLAGNTDDELVDALTSMIQEMNKKMDIPLNLKEYGVTEEDFNENLDFIAHNAVLDASTGSNPRPITEEEMKKVFKCTFTGEKVNF

SEQ ID NO: 229 - protein, 388 aa, Artificial Sequence
  Description of Artificial Sequence: Synthetic polypeptide
MARFTLPRDIYHGEGSLEVLKTLKGKKAFVVVGHASMKRFGFLQKVENYLKEAGMEVELFEGVEPDPSVETVMKGAEAMRKFQPDWIVAMGGGSPIDAAKAMWIFYEYPDFTFEQAVVPFGLPELRHKAKFVDIPSTSGTATEVTAFSVITNYTEKIKYGLADFNITPDIAIVDPELAQTMPAKLVAHVGMDAFTHAIETYTASLRSNFSDPLAIKAIEMVHENLVKSFEGDKTARNLMHEAQCLAGMAFSNALLGIVHSMAHQVGPVFHIPHGCATAIFLPYVIKYNRKVCEDRYADIARALKLEGNTDAELTDSLIKLINEFNDDLSIPHSLKEYGVEEADFKSNVKFIAHNAILDASTGSSPREIDEETMEKLFECTYYGTDVNF

SEQ ID NO: 230 - protein, 388 aa, Artificial Sequence
  Description of Artificial Sequence: Synthetic polypeptide
MARFTLPRDLYHGEGALEVLKTLKGKKAFVVVGHASMKRFGFLQKVENYLKEAGMEVELFEGVEPDPSVETVMKGAEAMRNFEPDWIVSIGGGSPIDAAKAMWIFYEYPDFTFEQAVVPFGLPELRHKAKFVDIPSTSGTATEVTAFSVITNYTERIKYGLADFNITPDIAIIDPELAQTMPKTLTAHVGMDAFTHAIETYTASLRSNFSDPLAIKAIEMVHENLFKSYEGDKEARNLMHEAQCLAGMAFSNALLGIVHSMAHQVGPVFHIPHGCATAIFLPYVIQYNRTKCEERYADIARALKLEGNNDAELTDALIARINKLNEKLSIPSSLKEYGVTEEDFKANLSFIAHNAVLDASTGSNPREIDDATMEKLFECTFYGTKVEL

SEQ ID NO: 231 - protein, 388 aa, Artificial Sequence
  Description of Artificial Sequence: Synthetic polypeptide
MARFTLPRDIYHGEGALEALKTLKGKKAFLVVGHASMKRFGFLKQVEDYLKEAGMEVELFEGVEPDPSVETVMKGAEAMRNFEPDWIVAMGGGSPIDAAKAMWIFYEYPDFTFEQAVVPFGLPDLRHKAKFVDIPSTSGTATEVTAFSVITNYSEKIKYGLADFNITPDIAIVDPALAQTMPKTLTAHVGMDAFTHAIETYTASLRSNFSDPLAIKAVEMVHENLIKSFEGDKEARNLMHEAQCLAGMAFSNALLGIVHSMAHQVGPVFHIPHGCATAIFLPYVIEYNRTKCENRYGDIARALKLKGNNDAELTDSLIELINGLNDKLEIPHSLKEYGVTEEDFKANLSFIAHNAVLDASTGSNPREIDDATMEKLFECTYYGTKVNL

SEQ ID NO: 232 - protein, 393 aa, Artificial Sequence
  Description of Artificial Sequence: Synthetic polypeptide
MSRFTLPRDIYYGANALEALKTLKGKKAVMVLGHASMKRFGFVDKAIGYLKEAGIETKLFENVEPDPSVETVMKGAAMMREFEPDWIISMGGGSPIDAAKAMWAFYEYPETTFEDLITPFNFPELRHKAKFCDIPSTSGTATEVTAFSVITDYAKGIKYGLADFNITPDVAIVDPALAETMPPHLVAYVGMDAFTHAIETYVSTLRTVFTDPLAIEAIHIVHKDLIKSFKGDMTCREEMHYGQCLAGMAFSNALLGIVHSMAHQTGPAFSTGHITHGLATAMYLPYVIAYNSKADGVAERYADIARTMGVVGDTTAELVEGLRAKIRSMNDAMGIPNTLKDFGIIEDEFKEKLEAIATNAVGDASTGSNPRPIDPATMAKLFTCIYYGTEVDF

SEQ ID NO: 233 - protein, 394 aa, Artificial Sequence
  Description of Artificial Sequence: Synthetic polypeptide
MGGIISMARFTLPRDIYHGKDSLEVLKSLEGKKAFIVIGHASMKRFGFLDKVLSYLKEANMETKVFEGVEPDPSVETVMKGAKEMEEFNPDWIVSIGGGSPIDAAKAMWIFYEYPDFTFEKAIVPFGLPKLRHKAKFVDIPSTSGTATEVTAFSVITDYKAKIKYGLADFEITPDIAIVDPSLAETMPEKLVAHVGMDAFTHAIETYTASLRSNFTDPLALKAIEMVHMHLVNSFKGDMEARGEMHEAQCLAGMAFSNALLGIVHSMAHQVGPVFHIPHGCATAIFLPYVIKYNRKACEDRYAQIARHIGLKGESERELTDALIDLINKFNKELNIPSSMKEYGIDENEFKTNLKFIAHNAVLDPSTGSNPREIDDETMEKLYTCAYYGSDVDF

SEQ ID NO: 234 - protein, 468 aa, Clostridium beijerinckii; identical to SEQ ID NO: 70

SEQ ID NO: 235 - protein, 467 aa, Clostridium botulinum
MERNLSVLSQTNDLKITKRTEGDKSNNKESYLGVFKKVENAITKAIYAQKKLSLYYTKEDRERIIKSIRKATLENKEILAKMIVDETHMGRYEDKILKHELVAKYTPGTEDLITTAWSGDQGLTLVEMSPYGVIGAITPSTNPTETVICNSIGMIAAGDSVVFNGHPGAKKCVAFAVDMINKAVIREGGPENLVTTVENPTMESLNVIMKHPYIKLLCGTGGPGLIKTLLNSGKKAIGAGAGNPPVIVDDSADIDKAAKNIIEGCSFDNNLPCIAEKEVFVFENVANDLIQNMIKNNAVLINENQVSKLLDLVLLERKDETLEYAINKKWVGKDAKLFLDKIGIKASDNVRCIICEVDANHPFVMTELMMPILPIVRVKDVDEAIECAKTAEQRKRHSAYMYSKNIDNLNRFEKEIDTTIFVKNAKSFAGVGFGAEGFTTFTIAGPTGEGITSARNFTRQRRCVLAG

SEQ ID NO: 236 - protein, 468 aa, Clostridium beijerinckii; identical to SEQ ID NO: 70

SEQ ID NO: 237 - protein, 468 aa, Clostridium saccharoperbutylacetonicum
MIKDTLVSITKDLKLKTNVENANLKNYKDDSSCFGVFENVENAISNAVHAQKILSLHYTKEQREKIITEIRKAALENKEILATMILEETHMGRYEDKILKHELVAKYTPGTEDLTTTAWSGDNGLTVVEMSPYGVIGAITPSTNPTETVICNSIGMIAAGNTVVFNGHPGAKKCVAFAVEMINKAIISCGGPENLVTTIKNPTMDSLDAIIKHPSIKLLCGTGGPGMVKTLLNSGKKAIGAGAGNPPVIVDDTADIEKAGKSIIEGCSFDNNLPCIAEKEVFVFENVADDLISNMLKNNAVIINEDQVSKLIDLVLQKNNETQEYSINKKWVGKDAKLFLDEIDVESPSSVKCIICEVSASHPFVMTELMMPILPIVRVKDIDEAIEYAKIAEQNRKHSAYIYSKNIDNLNRFEREIDTTIFVKNAKSFAGVGYEAEGFTTFTIAGSTGEGITSARNFTRQRRCVLAG

SEQ ID NO: 238 - protein, 480 aa, Pelosinus fermentans
MSIDQALIEKITLEILTKMQTGAKAAPAGYGDGIFETVDEAVAAARKAYQELKTLSLEKREVLIKAMRDVAYENATILAQMAVDESGMGRVSDKIIKNQVAALKTPGTEDLTTQAWSGDNGLTLIEMGPYGVIGAITPTTNPTETVICNGIGMIAAGNTVFFSPHPTAKNTSMKIITLLNQAIVKAGGPNNLLTSVANPSIKAANEMMKHPGINMLVATGGPGVVKAVLSSGKKAIGAGAGNPPVIVDETADIEKAARDIVAGCSFDNNLPCIAEKEVIAIGSIADRLITYMQKYGAYLISGSNIDRLLNVIMTVQEEKIAEGCTDKPKRSYGINKDYVGKDAKYLLSKIGIDVPDSVRVVLCETPADHPFVIEELMMPVLPVVQVKDIDEAIEVAVRVEHGNRHTAAMHSKNVDHLTRFARAVETTIFVKNAPSYAGIGVGGEGFTSFTLAGPTGEGITSPRSFTRQRRCVLVDAFSIV

SEQ ID NO: 239 - protein, 468 aa, Clostridium beijerinckii
MNKDTLIPTTKDLKLKTNVENINLKNYKDNSSCFGVFENVENAINSAVHAQKILSLHYTKEQREKIITEIRKAALENKEVLATMILEETHMGRYEDKILKHELVAKYTPGTEDLTTTAWSGDNGLTVVEMSPYGVIGAITPSTNPTETVICNSIGMIAAGNAVVFNGHPGAKKCVAFAIEMINKAIISCGGPENLVTTIKNPTMESLDAIIKHPLIKLLCGTGGPGMVKTLLNSGKKAIGAGAGNPPVIVDDTADIEKAGKSIIEGCSFDNNLPCIAEKEVFVFENVADDLISNMLKNNAVIINEDQVSKLIDLVLQKNNETQEYFINKKWVGKDAKLFSDEIDVESPSNIKCIVCEVNANHPFVMTELMMPILPIVRVKDIDEAVKYTKIAEQNRKHSAYIYSKNIDNLNRFEREIDTTIFVKNAKSFAGVGYEAEGFTTFTIAGSTGEGITSARNFTRQRRCVLAG

SEQ ID NO: 240 - protein, 527 aa, Caldalkalibacillus thermarum
MNMTEKDIEKIVQSVLHNVESALGKSASASPSVSAVSVASGEGIKPVQFKQVPVFQQETVKSPNRNRNLGGAEEKWGVFNHMEDAIEASYRAQMEFVKHFQLKDREKIITAIREAVLREKEVLARKVYEETKIGRYEDKVAKHELAALKTPGTEDLKTEAFSGDNGLTIVERAPYGLIGAVTPVTNPTETIINNAIGMLAAGNAVVFNVHPSSKRSCAYAVQLINKAITEAGGPHHLVTMVKEPTLDTLQTLIDSPKVKLLVGTGGPGLVQTLLKSGKKAIGAGAGNPPVIVDDTADLEHAARSIIEGAAFDNNLLCIAEKEVFVLESVADDLIFHMLNHGAYMLGQHEVEQVMAFALEEQGNEQNRGCGFNPQRHYQVSKDWIGQDARLFLEHIGVQPPTEVKLLICDVEFDHPFVQLEQMMPVLPIVRVKTLDEAIEKAVMAEHGNRHTAIMHSKNVDHLTKFARAIQTTLFVKNASSLAGVGYGGEGHTTMTIAGPTGEGVTSAKTFTRERRCVLAEGGFRIIG

SEQ ID NO: 241 - protein, 468 aa, Artificial Sequence
  Description of Artificial Sequence: Synthetic polypeptide
MNKDTLIPTTKLLKVKTNGENINLKNYKDNSSCKGVFENVEDALSSTVHARKILSGACGKEQREKIFSEIAKAALQNKEVLATMILEETHRGRYEDKILKHELRATVTPGTENLTTTAWSGDNGLTINAMWAMGPAGASTPLTNPTETVICNSIGCIVGGNAVAFNPHPCAGKCVAYGVEMINMAIKGCGGPLNLVTTIMNPTLESLAAICKHPMIQLLCGTGGPRLVAVILQGGKKAIGSSRGNPPTIVDSFADIERTSRSIIISCSLDNNIPCIAETSLFVPENVLKDVISVFLKLNAVIINEDQVSLLIDLVLAKNNETQEYFKNKKWVAKDAKLFLDEIDVESPWNVKNIACEVNENHPFVMTELLMPILPIVRVKDIYEAIKYAKIAEQPHKFSAMIYSKHIDNLNRFEREIDTTIFVKNAKSFAGVGYEAEGFTTFTIAGSTGEGITSARNFTRQRRCVLAG

SEQ ID NO: 242 - protein, 465 aa, Artificial Sequence
  Description of Artificial Sequence: Synthetic polypeptide
MERNLSVLSQTNLKPTKRTEGDKSNNKESYKGVFKKVEDALTKTIYARKKLSGACGKEDRERFSKSIAKATLENKEILAKMIVDETHRGRYEDKILKHELRATVTPGTENLITTAWSGDQGLTINAMWAMGPAGASTPLTNPTETVICNSIGCIVGGDSVAFNPHPGAGKCVAYGVDMINMAVKSEGGPLNLVTTVMNPTLESLAVICKHPMIQLLCGTGGPRLIAVILQGKKAIGSSRGNPPTIVDSFADIDRTSKNIIISCSLDNNIPCIAETSLFVPENVLNKVIQVFIKLNAVLINENQVSLLLDLVLLARKDETLEYAKNKKWVAKDAKLFLDKIGIKASWNVRNIACEVDENHPFVMTELLMPILPIVRVKDVYEAIECAKTAEQPKRFSAMMYSKHIDNLNRFEKEIDTTIFVKNAKSFAGVGFGAEGFTTFTIAGPTGEGITSARNFTRQRRCVLAG

SEQ ID NO: 243 - protein, 468 aa, Artificial Sequence; identical to SEQ ID NO: 241
  Description of Artificial Sequence: Synthetic polypeptide

SEQ ID NO: 244 - protein, 468 aa, Artificial Sequence
  Description of Artificial Sequence: Synthetic polypeptide
MIKDTLVSITKLLKPKTNVENANLKNYKDNSSCKGVFENVEDALSNTVHARKILSGACGKEQREKFSTEIAKAALENKEILATMILEETHRGRYEDKILKHELRATVTPGTENLTTTAWSGDNGLTINAMWAMGPAGASTPLTNPTETVICNSIGCIVGGNTVAFNPHPGAGKCVAYGVEMINMAIKGCGGPLNLVTTIMNPTLDSLAAICKHPMIQLLCGTGGPRLVAVILQGGKKAIGSSRGNPPTIVDSFADIERTGKSIIISCSLDNNIPCIAETSLFVPENVLKDVISVFLKLNAVIINEDQVSLLIDLVLAKNNETQEYSKNKKWVAKDAKLFLDEIDVESPWSVKCIACEVSESHPFVMTELLMPILPIVRVKDIYEAIEYAKIAERPHKFSAMIYSKHIDNLWRFERGADSTIFVKNGLSLAGVGYEAPGFTSFTIAVPTGEGMTSAANFTRQRRTVNAN

SEQ ID NO: 245 - protein, 480 aa, Artificial Sequence
  Description of Artificial Sequence: Synthetic polypeptide
MSIDQALIEKITLEILTKMQTGAKAAPAGYGDGIFETVDDALAATRKARQELKGCGLEKREVFSKAMADVAYENATILAQMAVDESGRGRVSDKIIKNQVRATVTPGTENLTTQAWSGDNGLTINAMWAMGPAGASTPLTNPTETVICNGIGCIVGGNTAFFSPHPTAGNTSMYGITLLNMAIKGAGGPLNLLTSVMNPSLKAAAEMCKHPMIQMLVATGGPRLVAVILQGGKKAIGSSRGNPPTIVSEFADIERTSRDIVISCSLDNNIPCIAETSLIAPGSILKRVITVFQKLGAYLISGSNIDRLLNVIMAVQEEKIAEGCTDKPKRSYGKNKDYVAKDAKYLLSKIGIDVPDWVRNVACETPEDHPFVIEELHMPVLPVVQVKYIDEAIEVAVRVEHPHRFTAMMHSKHVDHLTRFARAVETTIFVKNAPSYAGIGVGGEGFTSFTLAGPTGEGITSPRSFTRQRRCVLVDAFSIV

SEQ ID NO: 246 - protein, 468 aa, Artificial Sequence
  Description of Artificial Sequence: Synthetic polypeptide
MNKDTLIPTTKLLKPKTNVENINLKNYKDNSSCKGVFENVEDALNSTVHARKILSGACGKEQREKFSTEIAKAALENKEVLATMILEETHRGRYEDKILKHELRATVTPGTENLTTTAWSGDNGLTINAMWAMGPAGASTPLTNPTETVICNSIGCIVGGNAVAFNPHPGAGKCVAYGIEMINMAIKGCGGPLNLVTTIMNPTLESLAAICKHPMIQLLCGTGGPRLVAVILQGGKKAIGSSRGNPPTIVDSFADIERTGKSIIISCSLDNNIPCIAETSLFVPENVLKDVISVFLKLNAVIINEDQVSLLIDLVLAKNNETQEYFKNKKWVAKDAKLFSDEIDVESPWNIKCVACEVNENHPFVMTELLMPILPIVRVKDIYEAVKYTKIAERPHKFSAMIYSKHIDNLWRFERGADSTIFVKNGLSLAGVGYEAPGFTSFTIAVPTGEGMTSAANFTRQRRTVNAN

SEQ ID NO: 247 - protein, 527 aa, Artificial Sequence
  Description of Artificial Sequence: Synthetic polypeptide
MNMTEKDIEKIVQSVLHNVESALGKSASASPSVSAVSVASGEGIKPVQFKQVPVFQQETVKSPNRNRNLGGAEEKWGVFNHMEDAIEASYRAQMEFVKHFQLKDREKIITAIREAVLREKEVLARKVYEETKRGRYEDKVAKHELRATVTPGTENLKTEAFSGDNGLTINARWAMGPAGASTPLTNPTETIINNAIGCLVGGNAVAFNPHPSSGRSCAYGVQLINMAIKGAGGPLHLVTMVMEPTRDTLATLCDSPMVQLLVGTGGPRIVAVILQGGKKAIGSSRGNPPTIVDSFADLERTSRSIISGAALDNNILCIAETSLFVPESVLKDVIFVFLNLGAYMLGQHEVELVMAFALAEQGNEQNRGCGFNPQRHYQKSKDWIAQDARLFLEHIGVQPPWEVKLNICDVEEDHPFVQLEQMMPVLPIVRVKTLDEAIEKAVMAEHGNRHTAIMHSKNVDHLTKFARAIQTTLFVKNASSLAGVGYGGEGHTTMTIAGPTGEGVTSAKTFTRERRCVLAEGGFRIIG

SEQ ID NO: 248 - protein, 434 aa, Fusobacterium sp.
MKNWKESYKAKICTPDEAIQKIKDAKRISFGHICSESTVLTEALLRNKKLFKKLEIAHLLSVGKSEYAKEENSEYFRHNALFIGPKTREAANSSYGDYTPTFFFETAKLFGKDGELSLDAMLLQVSPPDEHGYCSYGLSCDYTKSATESAKIVIAQINKFVPRTFGNCFVHIDDIDYIIEEDTPIPEVQPPVVGEIERKIGEFCASLINDGDTLQLGIGAIPVAVLNFLKDKKDLGIHSEMISDGIVDLINLGVITNKKKNLNPNKSIATFLMGSKKLYDYADNNPAIELHPVDYVNNPIIIAQNDNMISINSAIEVDLTGQVNAEYINSKEFSGPGGQVDFVRGATMSKGGKSIIALPSTAANGTISKIVFNFEEGVPVTTTRNDVDYVITEYGIAHLRGKTLRERAKLLIEIAHPNFREELRKKALEKFGKL

SEQ ID NO: 249 - protein, 434 aa, Fusobacterium sp.
MKNWKESYKAKICTPDEAIQKIKDAKRISFGHICSESTVLTEALLRNKKLFKKLEIAHLLSVGKSEYAKEENSEYFRHNALFIGPKTREAANSSYGDYTPTFFFETAKLFGKDGELSLDAMLLQVSPPDEHGYCSYGLSCDYTKSATESAKIVIAQINKFVPRTFGNCFVHIDDIDYIIEEDTPIPEVQPPVVGEIERKIGEFCASLINDGDTLQLGIGAIPVAVLNFLKDKKDLGIHSEMISDGIVDLINLGVITNKKKNLNPNKSIATFLMGSKKLYDYADNNPAIELHPVDYVNNPIIIAQNDNMVSINSAIEVDLTGQVNAEYINSKEFSGPGGQVDFVRGATMSKGGKSIIALPSTTANGTISKIVFNFEEGVPVTTTRNDVDYVITEYGIAHLRGKTLRERAKLLIEIAHPNFREELRKKALEKFGEL

SEQ ID NO: 250 - protein, 434 aa, Fusobacterium sp.
MKNWKESYKAKICTPDEAIQKIKDAKRISFGHICSESTVLTEALLRNKKLFKKLEIAHLLSVGKSEYAKEENSEYFRHNALFIGPKTREAANSSYGDYTPTFFFETAKLFGKDGELSLDAMLLQVSPPDEHGYCSYGLSCDYTKSATESAKIVIAQINKFVPRTFGNCFVHIDDIDYIIEEDTPIPEVQPPVVGEIERKIGEFCASLINDGDTLQLGIGAIPVAVLNFLKDKRDLGIHSEMISDGIVDLINLGVITNKKKNLNPNKSIATFLMGSKKLYDYADNNPAIELHPVDYVNNPIIIAQNDNMISINSAIEVDLTGQVNAEYINSKEFSGPGGQVDFVRGATMSKGGKSIIALPSTAANGTISKIVFNFEEGVPVTTTRNDVDYVITEYGIAHLRGKTLRERAKLLIEIAHPNFREELRKKALEKFGEL

SEQ ID NO: 251 - protein, 434 aa, Fusobacterium sp.
MKNWKKSYKAKICTPDEAIQKIKDAKRISFGHICSESTVLTEALLRNKKLFKKLEIAHLLSVGKSEYAKEENSEYFRHNALFIGPKTREAANSSYGDYTPTFFFETAKLFGKDGELSLDAMLLQVSPPDEHGYCSYGLSCDYTKSATESAKIVIAQINKFVPRTFGNCFVHIDDIDYIIEEDTPIPEVQPPVVGEIERKIGEFCASLINDGDTLQLGIGAIPVAVLNFLKDKRDLGIHSEMISDGIVDLINLGVITNKKKNLNPNKSIATFLMGSKKLYDYADNNPAIELHPVDYVNNPIIIAQNDNMISINSAIEVDLTGQVNAEYINSKEFSGPGGQVDFVRGATMSKGGKSIIALPSTAANGTISKIVFNFEEGVPVTTTRNDVDYVITEYGIAHLRGKTLRERAKLLIEIAHPNFREKLRKKALEKFGKL

SEQ ID NO: 252 - protein, 450 aa, Desulfomonile tiedjei
MNWKSYYNQRTFPAREAVKAIKSGDRVVHAHACGEPACLVNAMVDRADELRDVEIVHMVSMGKAKYCQPEYATSFRHNALFVGNTSRQAVNEGRGDYTCCYFSEIPLLFRNGLLPVDVALIAVSPPDKLGFVCLGISVDYTKQAALSAKTVIAAVNPNMPRIGGDSYLHVTDIDYFVPTEEPLIELQPPALGDLERAIGSNVASLIKDGDCLQLGIGALPDAVLSFLGEKTDLGIHSEMISDGVMKLVEAGVVTCKRKNFRPRKAVITFAMGTRGFYEWLNDNALMESYPVDFTNDPSIIAQNDNMVSINSAISVDLQGQVAADTLGSKQFSGVGGQVDFVRGANRSKGGRSIIAMPSTAAKGKASRIVAALDRGQAVTTPRNDVAYVVTENGVAALKGKTIRQRAEALIAIAAPEFQDRLREEFFEVYGLRGPTIQVSVQVAAGSAGAA

SEQ ID NO: 253 - protein, 428 aa, Porphyromonas uenonis
MSIPFSSITPDEAVSHIQDGDFVVLSHAAAVPQACVAALARNYERFHNVRIFHMVTLGESPYTAPEMEGHFRLVTNFVGANTRPAVDEQRADFVPSYFYEVPSMMQPGGAFHPDVAIVQLSYPNEEGYCSFGTSCDYTKPAAEQARVVIGELNKQMPFVGGDNLIHISQLTHIVEADYPLYALDLPRIGEVEEAIGRNCAELIQDGDTLQLGIGAIPDAVLLFLKDKKDLGIHSEMVSDGVVKLIKANTITGRRKTLHPNKVVATFLMGTQELYDFAHNNPTIEMRPVNYVNDPRIIAQNDQLVSINSCIEVDLMGQVVSEAMGLRQFSGPGGQVDFVRGAAWSKGGRSIIAIPSTARRGTASRIVPLLTEGAAITTSRNDVDYIVTEYGVAHLKGKSLRERALALTAIAHPNFRPELEAECKRRFKL

SEQ ID NO: 254 - protein, 431 aa, Pelosinus fermentans
MNNWRRVYQNKIVSAEQAVQHIKSQDRVVTGHACGEPQALIEALVARSPEIKDVEIVHMVAMGPAKYAQPGQEKSFRHNALFVGGTTRKAVEEKRADFTPCFFSEIPRLFKNNILPVDVALIQITPPDEQGFCSYGVSADYTKTAAECAKIVIAQVNHCLPRTGGASIHLDAVHFIVEQEEPLIELKPPKIGDIEKAIGEHVAALIPDGATLQLGIGAIPDAVLLFLTDKKDLGIHSEMFSDGVVVLAEAGVITNRKKTIHTGKFMATFLMGTKRLYDFVNNNPDVELQSVDYINDPYIIGQHENMISINSALQVNLMGEVNAEMIGPKQFSAVGGQVDFIRGASRSLQGKSIIALPSTASGGTISRIACELDRGAAVTTSRNDVHYVVTEYGMADLRGKCLGERAKSLIAISHPDFRSRLTKEAQEKGLM

SEQ ID NO: 255 - protein, 432 aa, Megasphaera sp.
MQDWKEKYAGKIVSPAEAVSHVKSGDKIVFSHACGESQVLTEALVKQADRLKDVEIIHMVAMGAAKYCLPEMEGHFRHNALFVGATTREAVESGRADYTPCFFHEAPRLFTDGTIPVDVVMLQVSEPDENGICSLGISVDYTQAAASVATLKIAQINKNMPYTYGNGIHLDDLDYLVIKDEPIIELPPPKIGEIEQRIGEHVASLIQDGDTLQLGIGAIPDAVLSFLGDKKDLGIHSEMFSDGVVDLAEKGVITNRKKSLDPGKFLSCFLMGTKKLYNFIDHNPDVIIRPVDYTNDPFVISQIDNIISINSAMQVDLMGQVNAEMIGLRQFSGVGGQVDFVRGAARAKGGKAIIAMPSTTGKTKKISKIVPLLDRGAAVTTSRNDVDYIVTEFGIAALHGKTLRQRAKALIAIAHPDFRASLEEEFNARFGL

SEQ ID NO: 256 - protein, 431 aa, Pelosinus fermentans
MNNWRRVYQNKIVSAEQAVQHIKSQDRVVTGHACGEPQALIEALVARSPEINNVEIVHMVAMGPAKYAQPGQEKSFRHNALFVGGTTRKAVEEKRADFTPCFFSEIPRLFKNNILPVDVALIQITPPDEQGFCSYGVSADYTKTAAECAKIVIAQVNHCLPRTGGASIHLDAVHFIVEQEEPLIELKPPKIGDIEKAIGEHVAALIPDGATLQLGIGAIPDAVLLFLTDKKDLGIHSEMFSDGVVVLAEAGVITNRKKTIHTGKFMATFLMGTKRLYDFVNNNPDVELQSVDYINDPYIIGQHENMISINSALQVNLMGEVNAEMIGPKQFSAVGGQVDFIRGASRSLQGKSIIALPSTASGGTISRIACELDRGAAVTTSRNDVHYVVTEYGMADLRGKCLGERAKSLIAISHPDFRSRLTKEAQEKGLM

SEQ ID NO: 257 - protein, 434 aa, Fusobacterium periodonticum
MKNWQEKYKTKICSPDEAIQKIKSAKRISFGHICSESTVLTEALVRNKQLFKKLEIDHLLSIGKCEYAKEENSEYFHHNALFIGPKTREAANSFYGDYTPIFFYQTAKIFGKDGDLAPDAMLLQVSPPDENGYCSYGLSCDYTKSATESAKIVIAQINKFVPRTLGNCFVHLDDIDYIILEDTPIPEIPAPVIGELEEKIGANCASLINDGDTLQLGIGAIPFAVLNFLKQKKDLGIHSEMVSDGIVDLIQAGVITNKKKNFNPNKVIATFLLGTKKLYDYADNNPAIELHPVDYVNNPMIIAQNDNMISINSAIQVDLMGQVNAEYINTKQFSGPGGQVDFVRGATMSNGGKSIIALPSTTADEKISKIVFTFEEGVPITTTRNDVDYIITEYGIAHLKGKTLRERAKLLIEIAHPKFREDLRKKAIEKFKIL

SEQ ID NO: 258 - protein, 434 aa, Fusobacterium nucleatum
MKNWKESYKAKICTPDEAIQKIKDAKRISFGHICSESTVLTEALLRNKKLFKKLEIAHLLSVGKSEYAKEENSEYFRHNALFIGPKTREAANSSYGDYTPTFFFETAKLFGKDGELSLDAMLLQVSPPDEHGYCSYGLSCDYTKSATESAKIVIAQINKFVPRTFGNCFVHIDDIDYIIEEDTPIPEVQPPVVGEIERKIGEFCASLINDEDTLQLGIGAIPVAVLNFLKDKKDLGIHSEMISDGIVDLINLGVITNKKKNLNPNKSIATFLMGSKKLYNYADNNPAIELHPVDYVNNPIIIAQNDNMISINSAIEVDLTGQVNAEYINSKEFSGPGGQVDFVRGATMSKGGKSIIALPSTAANGTISKIVFNFEEGVPVTTTRNDVDYVITEYGIAHLRGKTLRERAKLLIEIAHPNFREELREKALEKFGTL

SEQ ID NO: 259 - protein, 434 aa, Fusobacterium sp.
MKNWKESYKTKICTPDEAIQKIKDAKRISFGHICSESTVLTEALIRNKKLFKKLEIAHLLSVGKSEYAKEENSEYFRHNALFIGPNTREAANSSYGDYTPTFFFETAKLFGKAGELSLDAMLLQVSPPDEHGYCSYGLSCDYTKSATENAKIVIAQINKFVPKTFGNCFVHIDDIDYIIEEDTPIPEVQPLVVGEIERKIGEFCASLINDGDTLQLGIGAIPVAVLNFLKDKKDLGIHSEMISDGIVDLINLGVITNKKKNLNPNKTIATFLMGSKKLYDYANDNPAIELHPVDYVNNPIIIAQNDNMISINSAIEVDLTGQVNAEYINSKEFSGPGGQVDFVRGSTMSKGGKSIIALPSTAANGTISKIVFNFEEGVPVTTTRNDVDYIITEYGIAHLRGKTLRERARLLIEIAHPNFREELRKKALEKFGKL

SEQ ID NO: 260 - protein, 434 aa, Fusobacterium sp.
MEKWQKKYKAKICSPDEAIQKIKSAKRISFGHICSESSVLTEALIRNKKLFKKLEIDHLLSIGKCEYAKEENSEYFHHNALFIGPKTREAANSSYGDYTPIFFYETAKIFGKDGDLSPDAMLLQVSTPDEHGYCSYGLSCDHTKSATESAKIVVAQINKFVPRTLGNCFIHIDDIDYIILEDTPIPEIPAPVVGELEEKIGANCASLINDGDTLQLGIGAIPFAVLNFLKDKKDLGIHSEMISDGIVDLIQAGVITNKKKNFNPNKVIATFLLGTKKLYDYANNNPAIELHPVDYVNNPMIIAQNNNMISINSAIQVDLMGQVNAEYINTKQFSGPGGQVDFVRGATMSNGGKSIIALPSTTADEKISRIVFTFEEGVPVTTSRNDVDYIITEYGIAHLKGKTLRERAKLLIEIAHPKFREELRKRAIEKFEIL

SEQ ID NO: 261 - protein, 434 aa, Fusobacterium nucleatum
MKKWKESYKLKICTPDEAIQKIKDAKRISFGHICSESSVLTEALVRNKKLFKKLEIAHLLSVGKSEYAKEENSEYFRHNALFIGSKTREAANSSYGDYTPTFFFETAKLFGKDGELALDAMLLQVSTPDEHGYCSYGLSCDYTKSATENAKIVIAQINKFVPRTLGNCFVHIDDIDYIIEEDTPIPEVQPPVVGEIERKIGGFCASLVRDGDTLQLGIGAIPVAVLNFLKEKKDLGIHSEMISDGIVDLINLGVITNKKKNLNPNKAIATFLMGSKKLYDYANDNPAIELHPVDYVNNPIIIAQNDNMVSINSAIQVDLMGQVNAEYIDSKQFSGPGGQVDFVRGATMSKGGKSIIALPSTTAKESISRIVFAFDEGTPVTTSRNDVDYVITEYGIAHLRGKTLRERAKLLIEIAHPKFREELRKKALEKFGEL

SEQ ID NO: 262 - protein, 434 aa, Fusobacterium sp.
MEKWQEKYKAKICSPDEAIQKIKSAKRISFGHICSESSVLTEALIRNKKLFKKLEIDHLLSIGKCEYAKEENSEYFHHNALFIGSKTREAANSSYGDYTPIFFYETAKIFGKDGDLSPDAMLLQVSTPDEHGYCSYGLSCDYTKSATESAKIVVAQINKFVPRTLGNCFIHIDDIDYIILEDTPIPEIPTPVVGELEEKIGANCASLINDGDTLQLGIGAIPFAVLNFLKDKKDLGIHSEMVSDGIVDLIQAGIITNKRKNFNPNKVIATFLLGTKKLYDYANNNPAIELHPVDYVNNPMIIAQNNNMISINSAIQVDLMGQVNAEYINSKQFSGPGGQVDFVRGATMSNGGKSIIALPSTTADEKISRIVFTFEEGVPVTTSRNDVDYIITEYGIAHLKGKTLRERARLLIEIAHPKFREELRRKAIEKFEIL

SEQ ID NO: 263 - protein, 434 aa, Fusobacterium nucleatum
MKNWKESYKTKICTPDEAIQKIKDAKRISFGHICSESTVLTEALIRNKKLFKKLEIAHLLSVGKSEYAKEENSKYFRHNALFIGPKTREAANSSYGDYTPTFFFETAKLFGKDGELALDAMLLQVSTPDEHGYCSYGLSCDYTKSATENAKIVIAQINKFVPRTFGNCFVHIDDIDYIIEEDTPILEVQPPVVGETERKIGEFCASLVRDGDTLQLGIGAIPVAVLNFLKDKKDLGIHSEMISDGIVDLINLGVITNKKKNLNPNKAIATFLMGSKKLYDYADNNPAIELHPVDYVNNPIIIAQNDNMVSINSAIQIDLMGQVNAEYVDSKQFSGPGGQVDFVRGTTMSKGGKSIIALPSTTAKGTISRIVFTFDEGVPVTTSRNDVDYVITEYGIAHLRGKTLRERAKLLIEIAHPNFREELRKKALEKFGEL

SEQ ID NO: 264 - protein, 434 aa, Fusobacterium nucleatum
MKNWKESYKAKICTPDEAIQKIKDAKRISFGHICSESTVLTEALLRNKKLFKKLEIAHLLSVGKSEYAKEENSEYFRHNALFIGPKTREAANSSYGDYTPTFFFETAKLFGKDGELSLDAMLLQVSPPDEHGYCSYGLSCDYTKSATESAKIVIAQINKFVPRTFGNCFVHIDDIDYIIEEDTPIPEVQPPVVGEIERKIGEFCASLINDGDTLQLGIGAIPVAVLNFLKDKRDLGIHSEMISDGIVDLINLGVITNKKKNLNPNKSIATFLMGSKKLYDYADNNPAIELHPVDYVNNPIIIAQNDNMISINSAIEVDLTGQVNAEYINSKEFSGPGGQVDFVRGATMSKGGKSIIALPSTAANGTISKIVFNFEEGVPVTTTRNDVDYVITEYGIAHLRGKTLRERAKLLIEIAYPNFREELRKKALEKFGEL

SEQ ID NO: 265 - protein, 434 aa, Fusobacterium nucleatum
MKNWKESYKSKIGTPDEAIQKIKDAKRISFGHICSESTVLTEALVRNKKLFKKLEIAHLLSVGKSEYAKEENSEYFRHNALFIGPKTREAANSSYGDYTPTFFFETAKLFGKDGELALDAMLLQVSTPDEHGYCSYGLSCDYTKSATENAKIVIAQINKFVPRTLGNCFVHIDDIDYIIEEDTPIPEVQPPVVGEIERKIGEFCASLVRDGDTLQLGIGAIPVAVLNFLKDKKDLGIHSEMISDGIVDLINLGVITNKKKNLNPNKAIATFLMGSKKLYDYANDNPAIELHPVDYVNNPIIIAQNDNMVSINSAIQVDLMGQVNAEYVDSKQFSGPGGQVDFVRGATMSKGGKSIIALPSTTGKGTISRIVFTFDEGVPVTTSRNDVDYVITEYGIAHLRGKTLRERAKLLIEIAHPDFREELRKKALEKFGEL

SEQ ID NO: 266 - protein, 431 aa, Roseiflexus sp.
MPRTLTTGTREMTAEEAVELIESNHRVYIGGGCGVPLPLLQALVARASELRNVEIIHMLTAGEDPTTAPDLAASFRHNALFIGHNTRRAVNEGRADFTPIFLSEIPKLFRKGILPLDVAMIQVSPPDRHGFCSLGVEVGCTLPAARTARIVIAEVNARMPRTLGDSFIHVSRLTAMVESDRPLLELPQGETNGVAQAIGRHIAELIPDGATLQLGIGAIPDAVLSNLRGKRHLGIHTELFSDGVIDLVESGVIDGELKTIHQGKVVAGFILGSQRCFDWAHNNAMVEMHPTDYVNDPFVIAQHKNMVAVNSALQVDLTGQVCADSIGTRLYSGVGGQLDFIRGASRSEGGIPIIAISSTARDGTISRIVPTLDPGAGVVTTRYDVHFVVTEYGVADLYGRTLAQRARALINVAHPAFRDQLTEAAKKLHYI

SEQ ID NO: 267 - protein, 428 aa, Porphyromonas asaccharolytica
MSIPFSSISPDEAVSHIQDGDFVVLSHAAAVPQACVAALARNYERFHDVRIFHMVTLGESPYTAPEMEGHFRLVTNFVGANTRPAVDEQRADFVPSYFYEVPSMMQPGGVFHPDVAIVQLSYPNEEGYCSFGTSCDYSKPAAEQARVVIGELNKQMPFVGGDNLIHISQLTHIVEADYPLYALDLPRIGEVEEAIGRNCAELIQDGDTLQLGIGAIPDAVLLFLKDKKDLGIHSEMVSDGVVKLIKAHTITGRCKTLLPNKVVATFLMGTQELYDFAHNNPAIEMRPVNYVNDPRIIAQNDHLVSINSCIEVDLMGQVVSEAMGLRQFSGPGGQVDFVRGAAWSKGGRSIIAIPSTARRGTASRIVPLLTEGAAITTSRNDVDYIVTEYGVAHLKGKSLRERALALTAIAHPNFRPELEAECKRRFKL

SEQ ID NO: 268 - protein, 434 aa, Fusobacterium nucleatum
MKNWKESYKTKICTPDEAIQKIKDAKRISFGHICSESTVLTEALIRNKKLFKKLEIAHLLSVGKSEYAKEENSEYFRHNALFIGPNTRETANSSYGDYTPTFFFETAKLFGKDGELALDAMLLQVSTPDEHGYCSYGLSCDYTKSATENAKIVIAQINKFVPRTLGNCFVHIDDIDYIIEEDTPIPEVQPPVVGETERKIGEFCASLVRDGDTLQLGIGAIPVAVLNFLKDKKDLGIHSEMISDGIVDLINLGVITNKKKNLNPNKAIATFLMGSKKLYDYADNNPAIELHPVDYVNNPIIIAQNDNMVSINSAIQIDLMGQVNAEYVDSKQFSGPGGQVDFVRGATMSKGGKSIIALPSTTAKGTISRIVFTFDEGVPVTTSRNDVDYVITEYGIAHLRGKTLRERAKLLIEIAHPNFREELRKKALEKFGEL

SEQ ID NO: 269 - protein, 445 aa, Geobacter bemidjiensis
MAATIWKEIKNWREIYNSRVTTADEALKSVNSGDRLYLTGNASVPLQLLDALVRRAPELRDVEVSQVLTICPQDYVSPEMQGHVRVNTMFISPNVRQAVNEGRADFTPVLLSEFPLLFKNGHLPLDVALLNVSLPDENGFCSLGGEAGLTMTAAESARIVIAQVNKKMPRTLGDTFFHVSRMTHIVEVDAPLTERHMAEEGDPEIVEQIAGHISSLIPDGATMQLGIGAIPDAVLKHLFSKKDLGIHSELISDGVIDLVEAGVVNCSRKTLHPGKIVCGFLLGTKRLYDWAHNNPMIELRRTEYVNDPFVVAQNDRMVSVNAAIEVDFTGQICADSIGPRMYSAVGGQMDFVYGASRSKGGVAVITMPSTSTLRDGSVVSKITPLLKHGAGVVTSRNHVRYLVTEYGAADLYAKSVRQRTQALIGVAHPMFREELTEKAKELRYI

SEQ ID NO: 270 - protein, 434 aa, Fusobacterium sp.
MKNWKESYKTKICTPDEAIQKIKDAKRISFGHICSESTVLTEALIRNKKLFKKLEIAHLLSVGKSEYAKEENSEYFRHNALFIGPNTREAANSSYGDYTPTFFFETAKLFGKDGELALDAMLLQVSTPDEHGYCSYGLSCDYTKSATENAKIVIAQINKFVPRTLGNCFVHIDDIDYIIEEDTPIPEVQPPVVGETERKIGEFCASLVRDGDTLQLGIGAIPVAVLNFLKDKKDLGIHSEMISDGIVDLINLGVITNKKKNLNPNKAIATFLMGSKKLYDYADNNPAIELHPVDYVNNPIIIAQNDNMVSINSAIQIDLMGQVNAEYVDSKQFSGPGGQVDFVRGATMSKGGKSIIALPSTTAKGTISRIVFTFDEGVPVTTSRNDVDYVITEYGIAHLRGKTLRERAKLLIEIAHPNFREELRKKALEKFGEL

SEQ ID NO: 271 - protein, 434 aa, Fusobacterium sp.
MKNWKESYKTKICTPDEAIQKIKDAKRISFGHICSESTVLTEALIRNKKLFKKLEIAHLLSVGKSEYAKEENSEYFRHNALFIGPNTREAANSSYGDYTPTFFFETAKLFGKDGELALDAMLLQVSTPDEHGYCSYGLSCDYTKSATENAKIVIAQINKFVPRTLGNCFVHIDDIDYIIEEDTPIPEVQPPVVGETERKIGEFCASLVRDGDTLQLGIGAIPVAVLNFLKDKKDLGIHSEMISDGIVDLINLGVITNKKKNLNPNKAIATFLMGSKKLYDYADNNPAIELHPVDYVNNPIIIAQNDNMISINSAIQIDLMGQVNAEYVDSKQFSGPGGQVDFVRGATMSKGGKSIIALPSTTAKGTISRIVFTFDEGVPVTTSRNDVDYVITEYGIAHLRGKTLRERAKLLIEIAHPNFREELRKKALEKFGEL

SEQ ID NO: 272 - protein, 435 aa, Eubacterium yurii
MDVKKVYEEKKMTAQEAVKKIKSGDRVIVGHACGEPACLLNAMVDNKDDYENVEIVHMVAMGKARYCEEGMEKHFRHNALFVGGTTKKAVNEARADFTPTFFFEVPKLFREKLPVDVVLAQVSPMDDDGYMSLGISVDYTKPACEIAKTVILQVNKNMPRTMGDSLIHISNATCIVECDETIYTLPRPAIGELEKKIGENCAKLIRDGDTLQLGIGAIPDAVLSFLTDKKDLGIHSEMFTDGVVELVKKGVVTNKMKKTHTGKMIATFLMGTRELYDFVDNNHDIAMFPVDYVNHPAIIMKEDNMVSINSCVQVDLMGQVVSESIGKTQISGVGGQVDFVRGASMAKNGRSIIAMPSTVKDKSSKIVVKIDDYAAVTTSRNDVDYVVTEYGIAELKGKTLKQRSENLIKIAHPKFREELIKYHNEKFNDNLKLEN

SEQ ID NO: 273 - protein, 431 aa, Roseiflexus castenholzii; identical to SEQ ID NO: 189

SEQ ID NO: 274 - protein, 434 aa, Fusobacterium nucleatum
MKNWKESYKSKICTPDEAIQKIKGAKRISFGHICSESTVLTEALVRNKKLFKKLEIAHLLSVGKSEYAKEENSEYFRHNALFIGPKTREAANSSYGDYTPTFFFETAKLFQKDEELALDAMLLQVSTPDEHGYCSYGLSCDYTKSATENAKIVIAQINKFVPRTLGNCFVHIDNIDYIIEEDTPIPEVQPPVVGEIERKIGGFCASLVRDGDTLQLGIGAIPVAVLNFLKDKKDLGIHSEMISDGIVDLINLGVITNKKKNLNPNKAIATFLMGSKKLYDYANDNPAIELHPVDYVNNPIIIAQNDNMVSINSAIQVDLMGQVNAEYIDSKQFSGPGGQVDFVRGATMSSGGKSIIALPSTTGKGTISRIVFTFDEGVPVTTSRNDVDYVITEYGIAHLRGKTLRERAKLLIEIAHPDFREELRKKALEKFGEL

SEQ ID NO: 275 - protein, 428 aa, Porphyromonas asaccharolytica
MSIPFSSISPDEAVSHIQDGDFVVLSHAAAVPQACVAALARNYERFHDVRIFHMVTLGESPYTAPEMEGHFRLVTNFVGANTRPAVDEQRADFVPSYFYEVPSMMQPGGVFHPDVAIVQLSYPNEEGYCSFGTSCDYSKPAAEQARVVIGELNKQMPFVGGDNLIHISQLTHIVEADYPLYALDLPRIGEVEEAIGRNCAELIQDGDTLQLGIGAIPDAVLLFLKDKKDLGIHSEMVSDGVVKLIKAHTITGQCKTLLPNKVVATFLMGTQELYDFAHNNPAIEMRPVNYVNDPRIIAQNDHLVSINSCIEVDLMGQVVSEAMGLRQFSGPGGQVDFVRGAAWSKGGRSIIAIPSTARRGTASRIVPLLTEGAAITTSRNDVDYIVTEYGVAHLKGKSLRERALALTAIAHPNFRPELEAECKRRFKL

SEQ ID NO: 276 - protein, 425 aa, Imtechella halotolerans
MHQFVSADQAVKAIKSGDRIYVQAAAAAPSVLIEALTKRASELQNVEICHLHTEGPAPYADPSLRDSFHVNSFFIGKNVRHTLKAGNGSYTPVFLSELPNVFRRGIVTLDVAFVHVSPPDSHGYCSLGVSVEASIAAIESAKIVIAQVNNQMPRTFGDGIIHVSEINYLVEANVPIFEHGMAEATEVELQIGRNIATLIEDGATLQMGIGSIPNAALLQLTNHKNLGLHTEMFSDGVIELIEKNVINCNYKVVNRGRALATFLLGSKRLYDFVNDNPFIEMRESSYVNDTAVIRQNPKTIAINSAIEVDLTGQVCADSIGSTMYSGVGGQMDFIRGASLSPGGKAIIALPSVTRRGESRIVSYLKTGAGVVTTRSHVQYIITEYGIAELYGKSLQQRAKALINIAHPAHREQLDKDFFSVQRSYV

SEQ ID NO: 277 - protein, 434 aa, Fusobacterium nucleatum
MKNWKESYKSKICTPDEAIQKIKDAKRISFGHICSESTVLTEALVRNKKLFKKLEIAHLLSVGKSEYAKEENSEYFRHNALFIGPKTREAANSSYGDYTPTFFFETAKLFGKDGELALDAMLLQVSTPDEHGYCSYGLSCDYTKSATENAKIVIAQINKFVPRTLGNCFVHIDDIDYIIEEDTPIPEVQPPVVGEIERKIGEFCASLVRDGDTLQLGIGAIPVAVLNFLKDKKDLGIHSEMISDGIVDLINLGVITNKKKNLNPNKAIATFLMGSKKLYDYANDNPAIELHPVDYVNNPIIIAQNDNMVSINSAIQVDLMGQVNAEYIDSKQFSGPGGQVDFVRGATMSKGGKSIIALPSTTGKGTISRIVFTFDEGTPVTTSRNDVDYVITEYGIAHLRGKTLRERAKLLIEIAHPDFREELRKKALEKFGEL

SEQ ID NO: 278 - protein, 435 aa, Eubacterium sp.
MDVKKLYEEKKMTAQEAVKKIKSGDRVIVGHACGEPACLLNAMVDNKDDYENVEIVHMVAMGKARYCEEGMEKHFRHNALFVGGTTKKAVNEARADFTPTFFFEVPKLFREKLPVDVVLAQVSPMDDDGYMSLGISVDYTKPACEIAKTVILQVNKNMPRTMGDSLIHISNATCIVECDETIYTLPRPEIGELEKKIGENCAKLISDGDTLQLGIGAIPDAVLSFLTDKKDLGIHSEMFTDGVVELVKKGVVTNKMKKTHTGKMIATFLMGTRELYDFVDNNHDIAMFPVDYVNHPAIIMKEDNMVSINSCVQVDLMGQVVSESIGKTQISGVGGQVDFVRGASMAKNGRSIIAMPSTVKDKSSKIVVKIDDYAAVTTSRNDVDYVVTEYGIAELKGKTLKQRSENLIKIAHPKFREELIKYHNEKFNDNLKLEN

SEQ ID NO: 279 - protein, 434 aa, Desulfosporosinus acidiphilus
MDWRETYKSRLTTADEAVKVVKSGDFVIPGHAASESELLVNALVKRYLDLENVTIIQGVALGSSPYCKPEMEGHFILKSMFVGANTRKSVWENRGTFFPLMFHEFPRAFREGYLGSDVFITMVSPPDEHGYCSLGMSVDHSKELVRCAKTVIAEVNPNVPRTYGDTFVHVSDLDYIVENDGPLLELNRFAAMDEVTQAIGRNVAGLINDGDTLQMGAGTIPDAILHYLKDKRDLGIHTEMFSDGLIDLIEAGIVNCSKKTINPGKIVVTFAEGTKKVYEYIDRNPMFQFHPVDYVNNPCIIAQHDNMVAINSALEIDLSGQVCAEALGAKQYSGIGGQLDFIRGAAAAKNGRPVIVLQSTAKSATISRISCQLKPGTPVTTTRNDVHWVATEYGAVDLFCKSEKERAAALISIAHPNFRDELKRQYREIYGRVL

SEQ ID NO: 280 - protein, 431 aa, Flavonifractor plautii
MNWKEYYKQHLMSAEDAVNHIQSGNRVVVAHACGEPSYLLDVMVANAKAYRDVEIVHMVAMGKAEYCKPEYAGNFRHNAFFVGGTSRDAIAEGRGDFTPSFFFEVPRQFSSTMPVDVAMVMVTPPDENGMCSLGVSVDYTLEAVKQAKLVIAQVNPQMPWTGPYSLVSVKDLDCIVEHEAPIIELKPPKIGDIEKAIGEHCASLVPDGATLQLGIGAIPDAVLLFLKHKKDLGIHSEMFSDGVVELAEAGVITNAKKTLHPGKFEVAFLMGTRRLYDFVDHNPDVELRPVDYVNNPFVIAQNENMVSINSCVQVDLMGQVASESIGPKQISGVGGQVDFVRGASASKGGVSIMAMPSTVKGKISKIVPLLDEGAAVTTSRNDVDYIVTEYGVAALKGQTLRQRARNLIEIAHPDFRDELKAEYEKRFHCKY

SEQ ID NO: 281 - protein, 430 aa, Clostridium arbusti
MNWKDIYKDRLVSAKEAVSNIKSGSRVVIGHAVGEPLALVDALVENKKYYDNLEIVHMVAMGKSEYVKPGMEKYFRHNALFVGNSTREAVNSGRADYTPGFFYEVPRLFKEGYLPVDVALIQVSVPDKHGYCSFGVSNDYTKPAADNAKLVIAEVNENMPRTLGDSFIHVSDIDYIVEASHPLIELQPSKIGDVEKAIGKYCASLIEDGSTLQLGIGAIPDAVLLFLKDKKDLGIHSEMISDGVVELVNDGVITNKKKAFHNGKIVVTFLMGTKKLYDFVNDNPMVESYPVSFVNDPETIMKNNDMISINSCIQVDLMGQICSESIGIKQISGVGGQVDFIRGTSMAKNGKAIIAMPSTAAKGKVSRIVPILDEGAAVTTSRNDVDYIITEYGIAHLKGKTLRDRAKDLIDIAHPDFREYLSEELKKRFR

SEQ ID NO: 282 - protein, 433 aa, Clostridium carboxidivorans; identical to SEQ ID NO: 198

SEQ ID NO: 283 - protein, 430 aa, Tannerella forsythia
MEWKTTYRNKIVSADEAVRQIRNNELVSLGHAAGVPQMCVDALVRNSTYFKNVGIYHMLVLGEAKYTEPGMEEAFRHVASFIGANTRSAIKEKRVDFLPAFLSEVPRMIRERLIPVDVAIVQLSPPDEDGNCSFGISSDYSKPSTEHARLVIGEINEQMPYIGGDNLIHLSKLDCIVEADYPLYTIAPPRITEVEEAIGRNCATLIEDGATLQLGIGAIPDAVLLFLKDKKNLGIHSEMFSDGVLELVKNGVINGKAKTLHPNKMVATFLMGTQALYDFVNHNPDVEMYPSDYVNDPRVIAQNDRMISINSCLSVDLAGQVSSESIGLQQISGTGGQVDYVRGSMWSRGGKSIMAMPSTAKNGTTSRIVATLTEGTTVTTSRNDVDYVVTEYGVARLRGKSLRERAKALIKIAHPDFREELEAFYQQRFH

SEQ ID NO: 284 - protein, 442 aa, Anaerostipes sp.
MRDKKDKPWKAEYREKLVSADEAVSHIRSGQRIVFSHAAGESLVLSDALVRNRALFENVEIVHMVAMGEAKYCEPGMEKHFRHNSFFLGASTRKAAKEGRADVTPVYFSEVPELFRTTLPVDAVFLNLSPPDEHGYCSFGISVDYSKPAAMEAELVIAQINPSMPRTLGDSFIHISDIDYIVEADTPLIELPPAGISEVERAIGKNCASLIEDGDTLQLGIGAIPDAVLGFLKEKKDLGIHSEMISDGIVELYEGGVITNRRKSLHAGKSIVTFLMGTRRLYDFADNNPAVELHPVDYVNDPYVIAQNERLVSVNSCVQVDLMGQVFSASVGRRQISGVGGQVDFVRGANMSRGGKSIMAMPSTAAEGRISKIVPVIGEGAAVTTSRYDADYIVTEYGAARLKGESLRNRAKKLIRIAHPDFRRMLAEEYEKRFREAWSDDE

SEQ ID NO: 285 - protein, 435 aa, Fusobacterium sp.
MENWKEIYKEKIVTADEAVKYIQSGNRVIFAHACGEAQIITEAMLRNKEEYEKVEIVHLVPMGTGEYAQEENQKYFYHNSFFGGGSTRKALNGTYGDFTPSFFFEIPKLFKKDGKLPVDVAIIQVSSPDEHGYCSYGISCDYTKGAAENAKIVIAQVNKYMPRTLGDSFIHLSEMDYIVAYDEPILQLVPPKIGEIEQKIGEYCASLIQDGDTLQLGIGAIPDAVLTFLKDKRHLGIHSEMISDGVVDLILAGVIDNSKKTIHKNKCVVSFLMGSPKLYDFVNNNPAVELYPVDYVNHPMIIAKNDNMISINSALQVDLMGQVNAESIGAKQFSGTGGQVDFVRGASMSKGGKSIIAMPSTAAKGRISKIVMNLDLGSTVTTSRNDVDYVVTEYGIASLKGKTLRERAKALIAIAHPDFRESLMKQALEKFQILN

SEQ ID NO: 286 - protein, 445 aa, Geobacter sp.
MAATIWKEIKNWREIYNSRVTTADEALKSVNSGDRLYLTGNASVPMQLLEALVKRAPELRDVEVSQVLTICPQDYVSPEMEGHVRVNTMFISPNVRQAVNEGRADFTPVLLSEFPLLFKHGHLPLDVALLNVSLPDENGFCSLGGEAGLTMTAAESARIVIAQVNKKMPRTLGDTFFHVSRMTHIVEVDAPLTERHMAEEGDPQIVEQIAGHISSLIPDGATMQLGIGAIPDAVLKHLFSKKDLGIHSELISDGVIDLVEAGVVNCSRKTLHPGKIVCGFLLGTKRLYDWAHNNPMIELRRTEYVNDPFVVAQNDRMVSVNAAIEVDFTGQICADSIGPRMYSAVGGQMDFVYGASRSKGGVAVITMPSTSTMRDGSVVSKITPLLKHGAGVVTSRNHVRYLVTEYGAADLYAKSVRQRTQALIGVAHPMFRDELTEKAKELRYI

SEQ ID NO: 287 - protein, 432 aa, Desulfosporosinus acidiphilus
MKWQTVYDGRIKEAAEAVRIIKSGQRVVIGHACGEPQALVEAMAERKSELQSVEIVHMVAMGKASYCLPEMEGHFRHNSLFVGGTSRKAVNEGRADFTPVFFSEIPSLFRDGYLPPDVALVQMSPPDQSGFCSLGVSVDYTLQALRSAHTVIAQVNHFMPRTLGDSFVHVSELDIIVPFDEPLIELPKPQISQVEENIGRFVAGLVPDGATLQLGIGAIPDAVLRFLTNKNDLGIHSEMFSDGVVNLYEMGVINNKAKTLHPGKMLATFLMGTRVLYDFVNDNPVVEMHSVDYTNNPYIIGRNERLTSINSALQVDLCGQVCADSIGYRQYSAVGGQVDFVRGARLSCGGKSIIALPSTAANGKISRIAIHLDEGAAVTTSRNDVDYIVTEYGIASLRGKTIRERANALIEIAHPQFHEELKVQAKKNGIPL

SEQ ID NO: 288 - protein, 429 aa, Clostridium kluyveri
MEWEEIYKEKLVTAEKAVSKIENHSRVVFAHAVGEPVDLVNALVKNKDNYIGLEIVHMVAMGKGEYTKEGMQRHFRHNALFVGGCTRDAVNSGRADYTPCFFYEVPSLFKEKRLPVDVALIQVSEPDKYGYCSFGVSNDYTKPAAESAKLVIAEVNKNMPRTLGDSFIHVSDIDYIVEASHPLLELQPPKLGDVEKAIGENCASLIEDGATLQLGIGAIPDAVLLFLKNKKNLGIHSEMISDGVMELVKAGVINNKKKTLHPGKIVVTFLMGTKKLYDFVNNNPMVETYSVDYVNNPLVIMKNDNMVSINSCVQVDLMGQVCSESIGLKQISGVGGQVDFIRGANLSKGGKAIIAIPSTAGKGKVSRITPLLDTGAAVTTSRNEVDYVVTEYGVAHLKGKTLRNRARALINIAHPKFRESLMNEFKKRF

SEQ ID NO: 289 - protein, 432 aa, Thermoanaerobacter siderophilus
MNWHDEYIRKVVSPDEAVKHIKSGDRVVIQHACGEPQLLVDAMVKNADMYENVEIVHMVAMGKAEYTKPGMEKHFWHNSLFLGATTREAINEGRGDYTPCFFFEIPNLFRNNILPVDVALIQVSKPDRHGYCSLGVSCDYTKAAVECAKIVIAEVNEKMPRTGGDCFVHVSDIDYIVEASEPIIELKRAKIGDVEKKIGENCAKLIEDGSTLQLGIGGIPDAVLSFLKDKNDLGIHSEMFSDGVVELVENGNITNKAKTLHKGKFIATFLMGSQKLYDFVNDNPAVGLYPVDYVNNPYIIAQNHRMVSINSAIQIDLMGQVAAESIGIKQFSGTGGQVDFVRGAALAKDGKAIIAMPSTAAGGKVSRIVPYLDEGAAVTTSRNDVQYVVTEYGIADLRGKTLRERARELINIAHPKFRDFLLEKAKERFKNF

SEQ ID NO: 290 - protein, 434 aa, Fusobacterium gonidiaformans
MTHWKGLYQERLCSAEQAVKSIPNNCRVVPSHAAGEPKHLVEAMMANREQYHNVDIFSMVNLGHAAYGKEEEKEHFHVNAAYASASTREVVNAEHGDFTPCFFYQVPELLKKDGPMPADVALIQVSLPDEHGYCSLGVSSDYTKEAAENAKIVIAQVNKYMPRTLGNNFVHVSKMTHIVEYDEPIHILNPPFVGETERKIGEYCASLIQDGDTLQLGIGAIPDAVLSFLTDKKHLGIHSEMISDGVVDLIEAGVIDNSRKNFNPGKSIVSFLMGTEKLYNYVHNNPALEMHPVDYVNHPIIAAQNDNLVSINSALQVDLMGQANSETLGHKQFTGIGGQVDFVRAASMSKGGRTIIAMPSTAAKGKISKIVFLLDEGAAVTTSRTDIDYVITEYGIAKLRGKSLRARAKALIEIAHPDFREGLREQALQKFGRL

SEQ ID NO: 291 - protein, 433 aa, Fusobacterium varium
MDWKEEYKKRVYSPEEAVKKIKSNNRVVICHAAGEPQTLVDAMVKNYKEYENVEIVHMVPLGKCEYMKPEMAGHFRHNGLFLGGGTREAVSAGAGEYTPSFFFEIPKLFRKGGNLPVDVALIQVSLPDEHGYCSLGITCDYTKAAAENAKCVIAQVNKFMPRVLGDNFIHISEIDAIVEKDEPIIVLNPPKIGDVERKIGEYCASLINDGDTLQLGIGGIPDAVLTFLKDKKDLGIHSEMISDGVVDLVKAGVINNSKKTLHRGKSIVSFLMGTRKLYDYVDDNPSVEIYPVDYVNDPRVISKNDNIVSINSAIQVDLMGQVNAETIGTKQFSGTGGQVDFVRGTAFALNGKSIIAIPSTASKGKVSRITAYLDEGAAVTTSRNDVQYIITEYGIADLRGKTLRERAKELIKIAHPDFREELTQKALEKYKTL

SEQ ID NO: 292 - protein, 436 aa, Fusobacterium necrophorum; identical to SEQ ID NO: 191

SEQ ID NO: 293 - protein, 443 aa, Anaerostipes caccae
MMRDKKDKPWKAEYREKLVSADEAVSHIRSGQRIVFSHAAGESLVLSDALVRNRALFENVEIVHMVAMGAAKYCEPGMEKHFRHNSFFLGASTRKAAKEGRADVTPVYFSEVPELFRTTLPVDAVFLNLSPPDEHGYCSFGISVDYSKPAAMEAELVIAQINPSMPRTLGDSFIHISDIDYIVEADTPLIELPPAGISEVERAIGKNCASLIEDGDTLQLGIGAIPDAVLGFLKEKKDLGIHSEMISDGIVELYEAGVITNRRKSLHAGKSIVTFLMGTRKLYDFADNNPAVELHPVDYVNDPYVIAQNERLVSVNSCVQVDLMGQVVSASVGRRQISGVGGQVDFVRGANMSRGGKSIMAMPSTAAEGRISKIVPVIGEGAAVTTSRYDADYIVTEYGTARLKGETLRNRARKLIRIAHPDFRRMLAEEYEKRFREAWSDDE

SEQ ID NO: 294 - protein, 432 aa, Clostridium sp.
MDWKDLYAQRKMTAEEAVARVRSGDRVVTPNAAGAPVHLINALVARKDDLKNVEIAHMVPLAKAPYAAPEMEGHFIHNSIFVGGSTRATIEAGIGDYTPCFFHKVPELFDTTLPVDVALIHVSAPDEHGYCSYGVTVDYEKHAAEVAKLVIAQVNENMPRTLGDCFIHVSEIDCIVECNDPILELGAPKITEIEKKIGGHCAELIKDGDTLQLGIGAIPDAVLLFLKEKKDLGIHTEMFSDGVVELVEAGVINNSKKTLHKGKSVATFLMGTRRLYDYVHNNPAVEMYPVNYVNDPVVIAKNDNLVSINSCVQIDLLGQVVSESIGPVQISGVGGQIDFIRGASMSRGGRSILAMNSTAAGGKVSKIVPFIDPWSAVTTSRNDVQYVVTEYGIAELRGHTMRDRARSLIEIAHPDFRDPLKEEFEKRFHTKY

SEQ ID NO: 295 - protein, 432 aa, Anaerofustis stercorihominis
MDLKQIYNSKVKNADDAVKAIKSGNRVVIAHAVGEPVYVVDKMVEHHKDYKDVEIVQLVPMGHSLYAKEEMKEHFRLNAFFLGGNTRDAVFEGRGDFTPCFFYQIPQLFRSCLPIDVALITVSPPDENGFCSFGTSCDYTKPAAEAAKIVIAQVNKKMPRTLGDGFIHINDIDIIVEHDEQVPELPNPKITDVEMKIGENCAKLINDGDTLQLGIGAIPDAVLKFLTHKKDLGIHSEMISDGVMDLYEKGVITCKKKNLHKGKMVVAFLMGTQKLYEFVHDNPAISMMDIEYVNNPIVIGQNDNMVSVNSALQVDLMGQVCAEAMGLKQFSGIGGQVDFIRGAAFSKGGKSILAFPSTAKKGTISKIVPFLTEGSAVTTSRTDVDYIVTEHGIAHLKGQTLKERARRLINIADPNFRDGLIAEFENRFKENF

SEQ ID NO: 296 - protein, 442 aa, Anaerostipes caccae
MRDKKDKPWKAEYREKLVSADEAVSHIRSGQRIVFSHAAGESLVLSDALVRNRALFENVEIVHMVAMGAAKYCEPGMEKHFRHNSFFLGASTRKAAKEGRADVTPVYFSEVPELFRTTLPVDAVFLNLSPPDEHGYCSFGISVDYSKPAAMEAELVIAQINPSMPRTLGDSFIHISDIDYIVEADTPLIELPPAGISEVERAIGKNCASLIEDGDTLQLGIGAIPDAVLGFLKEKKDLGIHSEMISDGIVELYEAGVITNRRKSLHAGKSIVTFLMGTRKLYDFADNNPAVELHPVDYVNDPYVIAQNERLVSVNSCVQVDLMGQVVSASVGRRQISGVGGQVDFVRGANMSRGGKSIMAMPSTAAEGRISKIVPVIGEGAAVTTSRYDADYIVTEYGTARLKGETLRNRARKLIRIAHPDFRRMLAEEYEKRFREAWSDDE

SEQ ID NO: 297 - protein, 438 aa, Clostridium aminobutyricum; identical to SEQ ID NO: 197

SEQ ID NO: 298 - protein, 438 aa, Clostridium aminobutyricum; identical to SEQ ID NO: 197

SEQ ID NO: 299 - protein, 448 aa, Clostridium aminobutyricum
MDWKKIYEDRTCTADEAVKSIKSGDRVLFAHCVAEPPVLVEAMVANAAAYKNVTVSHMVTLGKGEYSKPEYKENFTFEGWFTSPSTRGSIAEGHGQFVPVFFHEVPSLIRKDIFHVDVFMVMVSPPDHNGFCCVGVSSDYTMQAIKSAKIVLAEVNDQVPVVYGDTFVHVSEIDKFVETSHPLPEIGLPKIGEVEAAIGKHCASLIEDGSTLQLGIGAIPDAVLSQLKDKKHLGIHSEMISDGVVDLYEAGVIDCSQKSIDKGKMAITFLMGTKRLYDFAANNPKVELKPVDYINHPSVVAQCSKMVCINACLQVDFMGQIVSDSIGTKQFSGVGGQVDFVRGASMSIDGKGKAIIAMPSVAKKKDGSMISKIVPFIDHGAAVTTSRNDADYVVTEYGIAEMKGKSLQDRARALINIAHPDFKDELKAEFEKRFNAAFSAWSHPQFEK

SEQ ID NO: 300 - protein, 438 aa, Eubacterium saphenum; identical to SEQ ID NO: 195

SEQ ID NO: 301 - protein, 435 aa, Clostridium difficile
MSWRELYQSKLCSATEAVKQIKNGDTVVFAHCVGEPPALVEAMIENAEQYKDVEIKHMVSLGSGGYTAKGMEAHFRVNPMFVSGNVRKAIENGDGDFTPTFFHEVPKLLREKRLKCDVVLAQVTPPDEHGYCSLGTSVDYTYEAIKTARTVIVQVNDQFPRTYGEVVHVSEFDYIVEKSQPLFELQPAKIGEVEEAIGKNCASLIEDGSTLQLGIGGIPDAVMLFLTDKKDLGIHSEMISDGTLALYEKGVINGKYKNFDKEKMTVTFLMGTKKLYDFANNNPAVEVKPVDYVNHPAIIMKQHKMVSINSAIQVDLMGQVVAEAMGLRQFSGVGGQVDFIRGVSMGEDGKAIIAMPSITTKKDGTVISKIVSIVDEGAPITTSRNDVDYIVTEYGIAELKGKSLRERARNLINIAHPSVRESLAVEFEKRFKEKY

SEQ ID NO: 302 - protein, 435 aa, Clostridium difficile
MSWQELYQSKLCSATEAVKQIKNGDTVVFAHCVGEPPALVEAMIENAEQYKDVEIKHMVSLGSGGYTAKGMEAHFRVNPMFVSGNVRKAIENGDGDFTPAFFHEVPKLLREKRLKCDVVLAQVTPPDEHGYCSLGTSVDYTYEAIKTARTVIVQVNDQFPRTYGEVVHVSEFDYIVEKSQPLFELQPAKIGEVEEAIGKNCASLIEDGSTLQLGIGGIPDAVMLFLTDKKDLGIHSEMISDGTLALYEKGVINGKYKNFDKEKMTVTFLMGTKKLYDFANNNPAVEVKPVDYVNHPAIIMKQHKMVSINSAIQVDLMGQVVAEAMGLRQFSGVGGQVDFIRGVSMGEDGKAIIAMPSITTKKDGTVISKIVSIVDEGAPITTSRNDVDYIVTEYGIAELKGKSLRERARNLINIAHPSVRESLAVEFEKRFKEKY

SEQ ID NO: 303 - protein, 435 aa, Clostridium difficile
MSWQELYQSKLCSATEAVKQIKNGDTVVFAHCVGEPPALVEAMIENAEQYKDVEIKHMVSLGSGGYTAKGMEAHFRVNPMFVSGNVRKAIENGDGDFTPAFFHEVPKLLREKRLKCDVVLAQVTPPDEHGYCSLGTSVDYTYEAIKTARTVIVQVNDQFPRTYGEVVHVSEFDYIVEKSQPLFELQPAKIGEVEEAIGKNCASLIEDGSTLQLGIGGIPDAVMLFLTDKKDLGIHSEMISDGTLALYEKGVINGKYKNFDKEKMTVTFLMGTKKLYDFANNNPAVEVKPVDYVNHPAIIMKQHKMVSINSAIQVDLMGQVVAEAMGLRQFSGVGGQVDFIRGVSMGEDGKAIIAMPSITTKKDGTVISKIVSIVDEGAPITTSRNDVDYIVTEYGIAELKGKSLRERARNLIDIAHPSVRESLAVEFEKRFKEKY

SEQ ID NO: 304 - protein, 435 aa, Clostridium difficile
MSWRELYQSKLCSATEAVKQIKNGDTVVFAHCVGEPPALVEAMIENAEQYKDVEIKHMVSLGSGGYTAKGMEAHFRVNPMFVSGNVRKAIENGDGDFTPTFFHEVPKLLREKRLKCDVVLAQVTPPDEHGYCSLGTSVDYTYEAIKTARTVIVQVNDQFPRTYGEVVHVSDFDYIVEKSQPLYELEPAKIGEVEEAIGKNCASLIEDGSTLQLGIGGIPDAVMLFLTDKKDLGIHSEMISDGTLALYEKGVINGKYKNFDKEKMTVTFLMGTKKLYDFVNNNPAVEVKPVDYVNHPAIIMKQHKMVSINSAIQVDLMGQVVAEAMGLRQFSGVGGQVDFIRGVSMGEDGKAIIAMPSITTKKDGTVISKIVSIVDEGAPITTSRNDVDYIVTEYGIAELKGKSLRERARNLINIAHPSVRESLAIEFEKRFKEKY

SEQ ID NO: 305 - protein, 433 aa, Clostridium sp.; identical to SEQ ID NO: 196

SEQ ID NO: 306 - protein, 433 aa, Clostridium arbusti
MNWKDVYKNRLASAKKAVSKIESNSRIVVSHAVGEPLDLMNALVENRNEYKNLEIVHMLAMGKGEYVKPEMKKFFHHNALFVGTSTMEAVKSGRAEYTPCFFYEVPRLFKEGYLSVDVALIQVSEPDQYGYCSFGVSNDYSKPAAESAKLVIAEVNKNMPRILGDSFIHVSDIDYIVESSHPLIELKPPKIGDVEKAIGKYCASLIEDGSTLQLGIGAIPDAVLLFLKDKKDLGIHSEMISDGVVELVEAGVINNKKKTLHKGKIVVTFLMGTKKLYDFVDNNPMVESYSVDYVNNPMVIMKNYKMVSINSCIQVDLMGQVCSESIGLNQISGVGGQVDFIRGASMAEYGKAIIAIPSTAAHGKVSRIVPFLNEGAAITTSRNEVDYIITEYGIAHLKGKTLSDRAQNLINIAHPDFRESLITEFEKRFNCKF

SEQ ID NO: 307 - protein, 436 aa, Lachnospiraceae bacterium; identical to SEQ ID NO: 190

SEQ ID NO: 308 - protein, 431 aa, Lachnospiraceae bacterium
MNWKEYYKQHLMSAEDAVNHIQSGNRVVVAHACGEPSYLLDVMVANAKAYKDVEIVHMVAMGKAEYCKPEYAENFRHNAFFVGGTSRDAIAEGRGDFTPSFFFEVPRQFSSTMPVDVAMVMVTPPDENGMCSLGVSVDYTLEAVKQAKLVIAQVNPQMPWTGPYSLVSVKDLDCIVEHEAPIIELKPPKIGDIEKAIGEHCASLVPDGATLQLGIGAIPDAVLLFLKHKKDLGIHSEMFSDGVVELAEAGVITNAKKTLHPGKFEVAFLMGTRRLYDFVDHNPDVELRPVDYVNNPFVIAQNENMVSINSCVQVDLMGQVASESIGPKQISGVGGQVDFVRGASASKGGVSIMAMPSTVKGKISKIVPLLDEGAAVTTSRNDVDYIVTEYGVAALKGQTLRQRARNLIEIAHPDFRDELKAEYEKRFHCKY

SEQ ID NO: 309 - protein, 436 aa, Clostridium beijerinckii; identical to SEQ ID NO: 194

SEQ ID NO: 310 - protein, 429 aa, Clostridium kluyveri; identical to SEQ ID NO: 192

SEQ ID NO: 311 - protein, 430 aa, Odoribacter splanchnicus
MEWKEIYKNRFATVEEAVRAIEDGDRLVFGHAAGCPQVVPAEMIAQKERLHDVGIYHMLTLNDGSYLTPGTEGHFRHITNFVGGNSRQAVADDRADFLPVFFYEIPQLFDEVYPVDVAVIQVSYPDSEGNCSFGLSCDYTKAAAEKARLVIAEMNENMPYVEGDNKIHISRLDYIIPTNLALPEIPLPKITDVEKAIGRNCASLIEDGSTLQLGIGAIPDAVLLFMGDKKNLGIHTEMFSDGVIDLVESGVVNGSKKTLHPGKLVATFLMGTRRLYDFVDKNACVEMRPVDYVNDPRVIAQNEKMVSINSCIEVDLMGQVASETIGLKQFSGTGGQVDYVRGAAWSAGGKSIMAMPSTAAKGKASRIVPFLAQGAAVTTSRNDVDYVVTEYGIARLKGKTLKQRARALIAVAHPDFRPMLEEEYQKRFKD

SEQ ID NO: 312 - protein, 431 aa, Porphyromonas gingivalis
MKDVLAEYASRIVSAEEAVKHIKNGERVALSHAAGVPQSCVDALVQQADLFQNVEIYHMLCLGEGKYMAPEMAPHFRHITNFVGGNSRKAVEENRADFIPVFFYEVPSMIRKDILHIDVAIVQLSMPDENGYCSFGVSCDYSKPAAESAHLVIGEINRQMPYVHGDNLIHISKLDYIVMADYPIYSLAKPKIGEVEEAIGRNCAELIEDGATLQLGIGAIPDAALLFLKDKKDLGIHTEMFSDGVVELVRSGVITGKKKTLHPGKMVATFLMGSEDVYHFIDKNPDVELYPVDYVNDPRVIAQNDNMVSINSCIEIDLMGQVVSECIGSKQFSGTGGQVDYVRGASWSKNGKSIMAIPSTAKNGTASRIVPIIAEGAAVTTLRNEVDYVVTEYGIAQLKGKSLRQRAEALIAIAHPDFREELTEHLRKRFG

SEQ ID NO: 313 - protein, 433 aa, Fusobacterium ulcerans
MDWREDYKKKVCSPEEAVKKIKSDSRVVICHAAGEPQTVVDAMVQNYKEYKNVEIVHMVALGKCEYMKPEMAGHFRHNGLFLGGGTRDVVNAGNGDYTTSFFFEIPKLFKKGGSMPVDVALIQVSTPDEHGYCSMGITCDYTKAAAENAKCVIAQVNKFMPRVLGDNFIHISEIDVIVERDEPIIVLNPPRIGDIERKIGEYCASLINDGDTLQLGIGAIPDAVLTFLKDKKDLGIHSEMISDGVVELVKAGVINNSRKTLHKGKSIVSFLMGTRKLYDYVDDNPSVEIYPVDYVNDPRVISKNDNIVSINSAIQVDLMGQVNAETMGTKQFSGTGGQVDFVRGTAFALNGKSVIAIPSTASKGKVSRITAYLDEGAAVTTSRNDVQYIITEYGIADLKGKTLRERAKELIKIAHPDFREELAQKALEKYKTL

SEQ ID NO: 314 - protein, 434 aa, Fusobacterium sp.
MENWKERYESKLCTSDEAIKKIAGVKRIIFEHACGESVLLTEALMKNKELFKKTEIIHLVAMGKGEYAKKENSEYFRHNALFAGGTTREAANSSYGDYTPSFFFEMPELFKKGGVLNPDVTIIQVSYPDEHGYCSYGISCDYTKCAAENSNIVIAQVNKFMPRTLGNCFIHIDNINYIVEQATPIIELKIPVIGEIEKRIGEHCASLIDDGATLQLGIGAIPDAVLSFLRHKKDLGIHSEMISDGVVDLVNLGVITNKRKNINTGKSIVSFLMGTRKLYDYIDNNPEIELHPVDYVNNPFIIAQNDNMISINSAIQVDLMGQVNAESIGSKQFSGTGGQVDFVRGAAMSKGGKSIIALPSTAAKGTISKIVFTLDEGAAVTTSRNDVDYIVTEYGIAHLKGKSLRERAKALIEIAHPDFREELKRKAVGKFGTL

SEQ ID NO: 315 - protein, 434 aa, Fusobacterium nucleatum
MGNWKERYESKLCTSDEAIKKIAGVKRIIFEHACGESALLTEALMKNKELFKKTEIIHLVAMGKGEYAKEENSKYFRHNALFAGGTTREAANSSYGDYTPSFFFEMPELFKKGGVLNPDVTIIQVSYPDEHGYCSYGISCDYTKCAAENSNIVIAQVNKFMPRTLGNCFIHIDNIDYIVEQATPIIELKIPVIGEIEKRIGEHCASLIEDGATLQLGIGAIPDAVLSFLRHKKDLGIHSEMISDGVVDLVNLGVITNKKKNINTGKSIVSFLMGTRKLYDYIDNNPEIELHPVDYVNNPFIIAQNDNMISINSAIQVDLMGQVNAESIGSKQFSGTGGQVDFVRGAAMSKGGKSIIALPSTAAKGTISKIVFTLDEGAAVTTSRNDVDYIVTEYGIAHLKGKSLRERAKALIEIAHPDFREELTKKAVGKFGTL

SEQ ID NO: 316 - protein, 434 aa, Fusobacterium nucleatum
MGNWKERYESKLCTSDEAIKKIAGVKRIIFEHACGESALLTEALMKNKELFKKTEIIHLVAMGKGEYAKEENSEYFRHNALFVGGTTREAANSSYGDYTPSFFFEMPKLFKKGGVLNPDVTIIQVSYPDEHGYCSYGISCDYTKCAAENSNIVIAQVNKFMPRTLGNCFIHIDSIDYIVEQATPIIELKIPVIGEIEKRIGEHCASLIDDGATLQLGIGAIPDAVLSFLRHKKDLGIHSEMISDGVVDLVNLGVITNKRKNINVGKSIVSFLMGTRKLYDYIDNNPEIELHPVDYVNNPFIIAQNDNMISINSAIQVDLMGQVNAESIGSKQFSGTGGQVDFVRGAAMSKGGKSIIALPSTAAKGTISKIVFTLDEGAAVTTSRNDVDYIVTEYGIAHLKGKSLRERAKALIEIAHPDFREELTKKAVGKFGTL

SEQ ID NO: 317 - protein, 436 aa, Fusobacterium sp.
MSNNWREVYKDKIVTADEAVKQIKSGDRLIFSHACGEAQEITDALLRNKESYEKVEIIHLVPMGKGEYAQEENQKYFYHNSFFGGGSTRKAINGAYGDFTPSFFFEIPNLFRKNGKLPLDVAIIQVSAPDEHGYCSYGISCDYTKGAAENAKIVIAQVNKYMPRTLGENFIHLSAIDSIVEYDQPILQLNPPKIGEVEKKIGEYCAGLIQDGDTLQLGIGAIPDAVLTFLKEKKHLGIHSEMISDGVVDLILAGVIDNSQKTIHKNKCIVSFLMGSQKLYDYVHNNPGVELYPVDYVNHPFVIAQNDNMVSINSALQVDLMGQVNAESMGAKQFSGTGGQVDFVRGAAMSKGGRSIIAMPSTAAKGTISKIVMNLDVGATVTTSRNDVDYIITEYGIAELKGKTLRERAKALIAIAHPDFREQLTKQALEKFQRLE

SEQ ID NO: 318 - protein, 431 aa, Porphyromonas gingivalis
MKDVLAEYASRIVSAEEAVKHIKNGERVALSHAAGVPQSCVDALVQQADLFQNVEIYHMLCLGEGKYMAPEMAPHFRHITNFVGGNSRKAVEENRADFIPVFFYEVPSMIRKDILHIDVAIVQLSMPDENGYCSFGVSCDYSKPAAESAHLVIGEINRQMPYVHGDNLIHISKLDYIVMADYPIYSLAKPKIGEVEEAIGRNCAELIEDGATLQLGIGAIPDAALLFLKDKKDLGIHTEMFSDGVVELVRSGVITGKKKTLHPGKMVATFLMGSEDVYHFIDKNPDVELYPVDYVNDPRVIAQNDNMVSINSCIEVDLMGQVVSECIGSKQFSGTGGQVDYVRGAAWSKNGKSIMAIPSTAKNGTTSRIVPIIAEGAAVTTLRNEVDYVVTEYGIAQLKGKSLRQRAEALIAIAHPDFREELTEHLRKRFG

SEQ ID NO: 319 - protein, 431 aa, Porphyromonas gingivalis; identical to SEQ ID NO: 56

SEQ ID NO: 320 - protein, 437 aa, Clostridium kluyveri
MVFKNWQDLYKSKIVSADEAVSKVSCGDSIILGNACGASLTLLDALAANKEKYKSVKIHNLILNYKNDIYTDPESEKYIHGNTFFVSGGTKEAVNCNRTDYTPCFFYEIPKLLKQKYINADVAFIQVSKPDSHGYCSFGVSTDYSQAMVQSAKLIIAEVNDQMPRVLGDNFIHISDMDYIVESSRPILELTPPKIGEVEKTIGKYCASLVEDGSTLQLGIGAIPDAVLLFLKDKKDLGIHSEMISDGVVELVEAGVITNKKKSLHPGKIIITFLMGTKKLYDFINDNPMVEGYPVDYVNDPKVIMQNSKMVCINSCVEVDFTGQVCAESVGFKQISGVGGQVDYMRGASMADGGKSILAIPSTAAGGKISRIVPILTEGAGVTTSRYDVQYVVTEYGIALLKGKSIRERAKELIKIAHPKFREELTAQFEKRFSCKL

SEQ ID NO: 321 - protein, 433 aa, Fusobacterium sp.
MDWREDYKRKVCSPEEAVKKIKSDSRVVICHAAGEPQTVVDAMVQNYKEYKNVEIVHMVALGKCEYMKPEMKGHFRHNGLFLGGGTRDVVNAGNGDYTTSFFFEIPKLFKKGGSMPVDVALIQVSTPDEHGYCSMGITCDYTKAAAENAKCVIAQVNKFMPRVLGDNFIHISEIDVIVERDEPIIVLNPPRIGDIERKIGEYCASLINDGDTLQLGIGAIPDAVLTFLKDKKDLGIHSEMISDGVVELVKAGVINNSRKTLHKGKSIVSFLMGTRKLYDYVDDNPSVEIYPVDYVNDPRVISKNDNIVSINSAIQVDLMGQVNAETMGTKQFSGTGGQVDFVRGTAFALNGKSVIAIPSTASKGKVSRITAYLDEGAAVTTSRNDVQYIITEYGIADLKGKTLRERAKELIKIAHPDFREELTQKALEKYKTL

SEQ ID NO: 322 - protein, 434 aa, Fusobacterium sp.
MGNWKERYESKLCTSDEAIKKIAGVKRIIFEHACGESALLTEALMKNKELFKKTEIIHLVAMGKGEYAKEENSEYFRHNALFAGGTTREAANSSYGDYTPSFFFEMPKLFKKGGVLNPDVTIIQVSYPDEHGYCSYGISCDYTKCAAENSNIVIAQVNKFMPRTLGNCFIHIDSIDYIVEQATPIIELKIPVIGEIEKRIGEHCSSLIDDGATLQLGIGAIPDAVLSFLRHKKDLGIHSEMISDGVVDLVNLGVITNKRKNINVGKSIVSFLMGTRKLYDYIDNNPEIELHPVDYVNNPFIIAQNDNMISINSAIQVDLMGQVNAESIGSKQFSGTGGQVDFVRGAAMSKGGKSIIALPSTAAKGTISKIVFTLDEGAAVTTSRNDVDYIVTEYGIAHLKGKSLRERAKALIEIAHPDFREELTKKAVGKFGTL

SEQ ID NO: 323 - protein, 437 aa, Clostridium tetani
MNWEDIYKSKLLSSKEAVLKLKSENHVAVGHAASEPRLLMKALVDNKESFRDLKLYQMIALEKSECAKKGMEKHFSYNSLFVGGGSREAINDGRADYIPCFFSRIPRLFRENYIKLDAALIQVAPPDEHGFCSFGVSSDYIKPAAECAKLVIAEVNDKMPRTLGDNFIHVSDIDYIVENSREIPELKPSNIGDIERAIGENCASLINNGDVLQLGIGAIPDAVLLFLKDKKDLGIHSEMISDGVVDLVKAGVINNKKKTLHQGKIIVSFLMGTKKLYDFVDNNPMVRMYPVDYVNNPVVISKNDNMVSINSCIQIDLMGQIDAETIGFTQISGVGGQIDFIRGAGLSKNGRSIIAIPSTVGNGKISKIVPLLDKGAAVTTTRNEVDYVVTEYGIARLKGKNLRDRARELIKIAHPDFREELKLEYKNRFKEEFKRIG

SEQ ID NO: 324 - protein, 434 aa, Fusobacterium sp.
MGNWKERYESKLCTSDEAIKKIAGVKRIIFEHACGESILLTEALMKNKELFKKTEIIHLVAMGKGEYAKEENSEYFRHNALFAGGTTREAANSSYGDYTPSFFFEMPELFKKGGVLNPDVTIIQVSYPDEHGYCSYGISCDYTKCAAENSNIVIAQVNKFMPRTLGNCFIHIDNIDYIVEQATPIIELKIPVIGEIEKRIGEYCASLIDDGATLQLGIGAIPDAVLTFLRYKKDLGIHSEMISDGVVDLVNLGVITNKRKNINTGKSIVSFLMGTRKLYDYIDNNPEIELHPVEYVNNPFIIAQNDNMISINSAIQVDLMGQVNAESIGSKQFSGTGGQVDFVRGAAMSKGGKSIIALPSTAAKGTISKIVFTLDEGAAVTTSRNDVDYIITEYGIAHLKGKSLRERAKALIEIAHPDFREELRKKAVGKFGAL

SEQ ID NO: 325 - protein, 435 aa, Filifactor alocis
MDWKKIYQERLVSAEEALSHVKSGDHVALGHALAEPTYLLEEMVRLKDNYKNVKFSGLVPGKAPYAAEGLGEHFRTCSMFLGASTRKAVERGDGEFIPRFFYEVPRTYREDWPVDVAMVTLSAPDKHGFCSFGISVDFTKTIAENAKIVIGQVNKYMPRTHGDSFIHISDIDFLVEHDEPLVELPKPHIGEVESKIGEYVASLVNDGDCLQLGIGAIPDAALQFMKDKKDLGIHSEMISDGVMDLMKAGVITNKKKNFHNRRTVVTFLMGTKDLYDYVDDNPFFEMYPVDYVNDPRVVSQNDNMVCINSCIQVDLTGQVVSGSIGPRQFSGVGGQVDFVRGAAWSKGGRNIIAMPSTVKGKMSKIVPVITEGSSVTTSINDVDYIITEYGIAKLGSKSLNERARALINIAHPDFREELAKAYEERFHEKCDYKRD

SEQ ID NO: 326 - protein, 432 aa, Bacteroidetes oral
MRNREKPFGEKIVTADEAVAAIGNGDCVVFSHAAGVPQEIPQALIRNKERFRDVHIYHMLCLGDGEYLSEGFEKHFRHITNFVGANSRKAIEQGRADFMPCFFFEIPYMFRRKQLPVDVAVIQITPPDVMGNCSFGVSCDYTKPAAEEARVVIAEMNENMPCVGGDNFIHISQIDYIVSCANPLPEILPSHIGSVEKAIGGYCAELIENGSTLQLGIGAIPDAVLMSLTDKKDLGIHTEMFTDGVIDLVEKGVINGSKKTLHPRKHIATFLMGSKRLYDFVNNNNTVELYPVDYVNNPYVIMQNADMVSINSCIEVDLMGQVVSECIGSRQFSGAGGQVDYVRGAMLSQGGKSIMAMPSTAAKGTVSRIVPFLAHGAAVTTSRNDVDYVVTEYGIAHLKAKTLKERAKSLISIAHPDFRAELIEEFNERFAQ

SEQ ID NO: 327 - protein, 433 aa, Clostridium sp.
MSFKELYQSKKMDADQALNLIRSGDRVVVGHACAEPSYLLDVLTEKAEQYENVEIVHMVAMGKAGYCAPGMEKHFRHNSLFVGGSTRKAVAEGRGDFTPCFFSEIPKLFKNDSLPVDAALIQTAPPDENGNLSLGISVDYTLQAAKSAKTVIVQVNPQMPVTFGGTIHISDVTAVVEHDAPLLTLEPPVIGDVELAIGANCAGLIRDGDTLQLGIGAIPDAVLRFLGDKKDLGIHSEMFSDGVVELAEAGVITNRLKKTNPGKYVASFLMGTRKLYDFVDGNPDVAMLPVDYVNNPVEVMKEDNIVSVNSCVQIDLMGQAASESVGLTQISGVGGQVDFVRGAAMAANGRSILAFPSTAAKGKISKIVPLLDEGAAVTTSRNDIDYAVTEYGIAKLKGRTLRQRALALIEIAHPDFRDGLRKVFEERFPGRRS

SEQ ID NO: 328 - protein, 429 aa, Porphyromonas endodontalis
MEEYKSKVVSAQEAIRAIKNGDSVVLSHAAGAPQLISRALADNYQNYQDVKIFHMLVLGDAPYCAPEMEGHFRHVTNFVGGNTRQALADGRADFIPLFFYQVPRMFENGAIPVDVAVVHVSEPNEEGYCSYGVSCDYTKPAAERAKVVIAEMNKQMPFVHGDNLIHVSKLDYIVEADYPLYEIALPTIGDVEKAIGDNVAHLVQDGDTLQLGIGAIPDAVLLFLKDKKDLGIHTEMFSDGVLELVRAGVITGKKKEIDNGKLTATFLMGSRDLYDFVNNNPDVRLAPVNWVNDPVTVMNFDRMVSINSCIEVDLMGQVASETIGYKQFSGTGGQVDYVRGASMSGHGVSIMAMPSTAAKGKVSRIVPLLAEGAAVTTSRNDVDYVVTEFGAAKLKGKSLRERAEALISIAHPDFRPQLLEEFNKRFPSK

SEQ ID NO: 329 - protein, 434 aa, Megasphaera elsdenii
MDWRKEYAEKIVSVEEAVSHVQSGNRIVFTHACGEAQALTDELVRQADRLENVEIVHMVAMGKAPYCQPGMEKHFRHNALFVGGSTRKAVEEGRGDYTPCFFHEIPKLFTDGTLPVDVAFLQLSEPDENGICSYGVSVDYTQPAAEAAKLVIAQINKNMPYTYGNGINLKDIDYIVEKDEPLIELQPPKIGETEHKIGEYVASLIHDGDTLQLGIGAIPDAVLSFLGDKKDLGIHSEMFSDGVVDLARKGVITNKKKTIDQGKFVSCFLMGTKKLYDFVNNNPDVLMERVDYTNDPFVVAKIDNIISINSAMQVDLMGQVNAEMIGYKQFSGVGGQVDFVRGASRAKGGKAIIAMPSTAGHGKISKIVPLLDEGAAVTTSRNDVDYIITEFGIAPLKGRTLRQRAIALIKIAHPDFREGLIAEFEKRFHCKFEG

SEQ ID NO: 330 - protein, 464 aa, Desulfatibacillum alkenivorans
MNWQELYNQKCVSASEAVAQIQSGDRVVVGHACGSPETLLAAMVAGKEQYTGVELVHMVSMGPSEYCSEENAVHFFHNSLFAGATSRTAVNQGRGIFTPCHFSQIPRLFTDNILPVDVTLCMISPPDEHGYCSFGISVDYTKPAAESSRLVIAEVTPHMPRTLGDSFIHVSDIDFIVETNAKPLTLPLPKITPTDEAIGGHIAELIKDGDCLQLGIGAVPDSILGFLKDKKDLGVHTEMFSDGVVDLVESGVITCAKKNLHNGKMAATFFMGTERLYKFVHNNPMVMMFPVDYTNSPAVIAQNDNMVSVNSALQVDFNGQVVSDTIGHKQYSGTGGQVDFVRGAAMSKGGRSILAFHSTAAKGKISRVVPRIDPGACVTTARTDVHYIVTEFGVADLRGKSVSERAKALINIAHPEFREDLRAEFENIYLKENPLLRPLPEEHRKRYWPHEARQDFLKQYAQAS

SEQ ID NO: 331 - protein, 438 aa, Peptoniphilus indolicus
MRRDILNWLEEYNSKLVDVHTAIENIKSGNRVVFEHACGEPKYLIDNLVENYKNLENVEIVHMVPMGSAKYCDEGMEKHFKHNGFFLGSNTKKAVHEGRADFTPSFFFEIPKLFRTKMPIDVVLVQVSKPDDFGYVSLGISVDYTKSACENAKIVIAQVNKYMPRTMGESFIHISDIDYIVEYDEPIYTLPRPNIGDVEMKIGKYCSTLIEDGDTLQLGIGAIPDAVLSFLDDKKDLGIHSEMFADGVIDLVKKGVITNKCKNLYKGKMVATFLMGTRELYDFVNDNPMVQMMPVDYVNNPCIIMQEDNLVSINSCVQVDLMGQVASESIGKNQISGVGGQVDFIRGASMAKNGRSIIAMPSTVKGKTSKIVACLDEGAAVTTSRNDVDYIVTEYGIAELKGKTLRQRSEALIRIAHPDFRDELIKAHNMKFNDELKI

SEQ ID NO: 332 - protein, 431 aa, Desulfitobacterium metallireducens
MNNWRDKYQNKIVTADQAVKNVKSGDRVVFGHACGEPEALVEALVNRGSELQDVEIVHMVAMGPGKYSQPEYAANFHHNGLFMGGPTRKALEEKRADYTPCFFSEIPRLFKDGILTVDVAFIQVTPPDEDGYCSYGISCDYTQSVAESAKIVLAQMNRNMPRTGGSRIHLDEIDFIVEQDGALIELQPPKIGDIEKAIGENVASLVQDGATLQLGIGAIPDAVLLFLNDKKDLGIHSEMFSDGVVALAEAGVVTNKRKKVHPGKFIATFLMGTRKLYDFVDNNPDVELYPVDYVNDPFIVGQNDNVVGINSALQVDLMGQVNAEMIGSRQFSGVGGQLDFVRGASRSKNGISIIALPSTASHGKISRISCELDRGAAVTTSRNDVQYIVTEYGIANLRGKNLRQRAAELIGIAHPDFRTQLFDEAKEKGIL

SEQ ID NO: 333 - protein, 430 aa, Acetonema longum
MNWRNTYRERIISAEQALKNVKSGDRVVTGHACGEPPALIEALAARAPELQNVEIVHMVAMGPAKYAQPGMEASFRHNAFFVGGSTRKAVEEKRADYTPCFFSEIPRLFRNNILPVDVALIQVTPPDEAGFCSFGISADYTVAAAECAKITIAQINNNLPRTGGVRIRLDNIQFIVEKDDPLIELKPPAIGDVEKRIGENIAGLIPDGATLQLGIGAIPDAVLLFLKEKKDLGIHSEMFSDGVVALAEAGVVTNRKKSINSGKFMVAFLMGTRKLYDFVHNNPDVELHPVDYINDPYIIGQHENMISINSALQVDCMGQVNAEMIGSRQFSGIGGQVDFVRGVSRSKGGKSIIALPATASGGRISRITCELDRGAAVSTSRNDVHYIVTEYGVANLRGKSLRERAKALIAIAHPDFRETLREEAQRTGVF

SEQ ID NO: 334 - protein, 434 aa, Porphyromonas gingivalis
  MOD_RES (4)..(4): Any amino acid
  MOD_RES (62)..(62): Any amino acid
  MOD_RES (71)..(71): Any amino acid
  MOD_RES (75)..(75): Any amino acid
  MOD_RES (112)..(112): Any amino acid
  MOD_RES (129)..(129): Any amino acid
  MOD_RES (163)..(163): Any amino acid
  MOD_RES (182)..(182): Any amino acid
  MOD_RES (243)..(243): Any amino acid
  MOD_RES (269)..(269): Any amino acid
  MOD_RES (275)..(275): Any amino acid
  MOD_RES (310)..(310): Any amino acid
  MOD_RES (322)..(322): Any amino acid
  MOD_RES (358)..(358): Any amino acid
SNAXKDVLAEYASRIVSAEEAVKHIKNGERVALSHAAGVPQSCVDALVQQADLFQNVEIYHXLCLGEGKYXAPEXAPHFRHITNFVGGNSRKAVEENRADFIPVFFYEVPSXIRKDILHIDVAIVQLSXPDENGYCSFGVSCDYSKPAAESAHLVIGEINRQXPYVHGDNLIHISKLDYIVXADYPIYSLAKPKIGEVEEAIGRNCAELIEDGATLQLGIGAIPDAALLFLKDKKDLGIHTEXFSDGVVELVRSGVITGKKKTLHPGKXVATFLXGSEDVYHFIDKNPDVELYPVDYVNDPRVIAQNDNXVSINSCIEIDLXGQVVSECIGSKQFSGTGGQVDYVRGAAWSKNGKSIXAIPSTAKNGTASRIVPIIAEGAAVTTLRNEVDYVVTEYGIAQLKGKSLRQRAEALIAIAHPDFREELTKHLRKRFG

SEQ ID NO: 335 - protein, 433 aa, Clostridium symbiosum
MSFKELYQSKKMDADQALNLIRSGNRVVVGHACAEPSYLLDVLTEKAEQYENVEIVHMVAMGKAGYCAPGMEKHFRHNSLFVGGSTRKAVAEGRGDFTPCFFSEIPKLFKNGSLPVDAALIQTAPPDENGNLSLGISVDYTLQAAKSAKTVIVQVNPQMPVTFGGTIHISDVTAVVEHDAPLLTLEPPVIGDVELAIGANCAGLIRDGDTLQLGIGAIPDAVLRFLGDKKDLGIHSEMFSDGVVELAEAGVITNRLKKTNPGKYVASFLMGTRKLYDFVDGNPDVAMLPVDYVNNPVEVMKEDNIVSVNSCVQIDLMGQAASESVGLTQISGVGGQVDFVRGAAMAANGRSILAFPSTAAKGKISKIVPLLDEGAAVTTSRNDIDYAVTEYGIAKLKGRTLRQRALALIEIAHPDFRDGLRKVFEERFPGRRS

SEQ ID NO: 336 - protein, 434 aa, Megasphaera sp.
MKDWRTKYASKIVSPAEAVSHVKSGDKIVFSHACGEAQVLTEELVNQAERLHDVEIIHMVAMGPARYCLPEMAGHFRHNALFVGATTRKAVEEGRADYTPCFFHEAPGLFREGIIPVDVVFLQVSEPDENGNCSLGISVDYTQAAAGVAKLKIAQINKNMPYTYGNGIHLDELDYIVEKDEPLIELQPPKIGEIEQCIGEHVASLIKDGDTLQLGIGAIPDAVLSFLGDKKDLGIHSEMFSDGVVDLARKGVITNRRKNIDTGKFLSCFLMGTKKLYDFIDHNPEVWIKPVDYTNDPFVIAQIENIVAINSAMQVDLMGQVNAEMIGRRQFSGVGGQVDFVRGTSRAKGGRAIIAMPSTTGKTKKISKIVAMLDAGAAVTTSRNDVDYIVTEYGIAALKGKTLRQRAEALIAIAHPDFREELKADFAKMFPVSV

SEQ ID NO: 337 - protein, 433 aa, Syntrophothermus lipocalidus
MSWKEYYEKRIVTPEEAAKLIKSNDRVVLGHACGEPKLVVDAMVERAGELENVEVVHMVAMGKARYCQPEYVKSFRHNALFVGAATRNALKEGRGDYTPCFFHEIPGLFRNNVLPVDVALVTVSPPDRHGFVSLGISVDYTRQAVLSAKTVIAEVNPNMPRTGGNSFLEVTDIDYFVLSEEPLYQLSPPEITDVERAIGENVASLIKDGDCLQLGIGAIPDAVLSFLGDKNDIGIHSEMVSDGVMNLVKKGVINCRRKTLHPNKIVITFAMGTAEFYRWLDYNPLIECYTVDYTNDPFVIARNDNMVSINSALAVDLLGQVAADTLGPYQFSGVGGQVDFVRGAARSSGGRSIIAMPATAAQGKASRIVPSLAPGQAVTTSRNDVDYVVTEFGVAKLKGKTVRDRARSLIEIAHPAFRDELREKFSQLMGYSI

SEQ ID NO: 338 - protein, 433 aa, Clostridium symbiosum
MSFKELYQSKKMDADQALNLIRSGDRVVVGHACAEPSYLLDVLTEKAEQYENVEIVHMVAMGKAGYCAPGMEKHFRHNSLFVGGSTRKAVAEGRGDFTPCFFSEIPKLLKNGSLPVDAALIQTAPPDENGNLSLGISVDYTLQAAKSAKTVIVQVNPQMPVTFGGTIHISDVTAVVEHDAPLLTLEPPVIGDVELAIGANCAGLIRDGDTLQLGIGAIPDAVLRFLGDKKDLGIHSEMFSDGVVELAEAGVITNRLKKTNPGKYVASFLMGTRKLYDFVDGNPDVAMLPVDYVNNPVEVMKEDNIVSVNSCVQIDLMGQAASESVGLTQISGVGGQVDFVRGAAMAANGRSILAFPSTAAKGKISKIVPLLDEGAAVTTSRNDIDYAVTEYGIAKLKGRTLRQRALALIEIAHPDFRDGLRKVFEERFPGRRS

SEQ ID NO: 339 - protein, 388 aa, Clostridium novyi
MARFTLPRDIYFGAGCLDVLKTIKGKRAVIVIGGGSIKRSGFLDKIEGYLKEANIETKLIEGVEPDPSVETVMNGAKVMREFNPDLIIGVGGGSPIDAAKAMWIFYEYPEFTFEKAVVPFGLPDLRQKAKFIAIPSTSGTASEVTAFSVITDYKAKIKYPLADFNLTPDIAIVDSDIAQTMPPKLVAHTGMDALTHAIEAYVAGARSAISDPLAMQAIVMVRDNLVKSFEGDKKARDEMHIAQCLAGMAFSNALLGITHSMAHKIGAVFHIPHGCANAIFLPYVIEYNRKACENRYATIARTLGLQGNTDKELVDSLIGLINELNVKLNIPSTIKEWGVSKEDFLKHVDFMAHNAVLDACTGANPREIDDKTMAKLYKCAFYGEKVDF

SEQ ID NO: 340 - protein, 394 aa, Clostridium perfringens
MGGIISMARFTLPRDIYHGKDSLEVLKSLEGKKAFIVIGGGSMKRFGFLDKVLSYLKEANMETKVFEGVEPDPSVETVMKGAKEMEEFNPDWIVSIGGGSPIDAAKAMWIFYEYPDFTFEKAIVPFGLPKLRRKAKFVAIPSTSGTATEVTAFSVITDYKAKIKYPLADFEITPDIAIVDPSLAETMPEKLVAHTGMDALTHAIEAYTASLRSNFTDPLALKAIEMVNMHLVNSYKGDMEARGEMHEAQCLAGMAFSNALLGIVHSMAHKVGAVFHIPHGCANAIFLPYVIKYNRKACENRYANIARHIGLKGESERELTDDLIDLINKFNKELNIPSSMKEYGIDENEFKANLKFIAHNAVLDPCTGSNPREINDETMEKLYTCAYYGSDVDF

SEQ ID NO: 341 - protein, 393 aa, Dorea formicigenerans
MARFTLPRDIYHGEGALEELKNLKGKKAIVVVGGGAMKRQGFLAKVEDYLKEAGMEVALFEGVEPDPSVETVMKGAKAMQEFEPDWIVAMGGGSPIDAAKAMWAFYEYPEITFEDLITPFSFPELRQKAKFAAIPSTSGTATEVTAFSVITDYAKGIKYPLADFNITPDVAIVDPALVAELPVKQVAYTGMDALTHAIEAYVSTLNCPYTDPLALKAIEMVFDYLPASYRCNMEARAKMHDAQCLAGMAFSNALLGIVHSMAHKTGAAFSTGHITHGLANAMYLPYVIKYNAKDPVAAKRYAEIARFVGLGGASEKALINSLCEKINEFNVILNIPATLKDFGIKEDEFKEKIATISENAVGDACTGSNPRTIDPATMERLFTCIYYGTEVDF

SEQ ID NO: 342 - protein, 396 aa, Clostridium hathewayi
MARFTLPRDLYHGKGALEELKNLKGNKAIVVVGGGSMKRFGFLDRVTDYLKEAGLEVKLFEGVEPDPSVDTVMKGAEMMREFGPDWIVAIGGGSPIDAAKAMWAFYEYPDTTFEELCIPFNFPTLRTKARFCAIPSTSGTATEVTAFSVITDYNKGIKYPLADFNITPDVAIVDPDLAETMPAKLTAFTGMDAMTHAIEAYVSTLHCDYTDPLALHAIKMIHNDLADSYHGDMAARDRMHNAQCLAGMAFSNALLGIVHSMAHKTGAAYSGGHIVHGCANAMYLPKVIKFNAKEAEAAKRYAEIARFIGLKGSTDGELVDALIAELRAMNGKLNIPACIREYEGGIIDEKEFNEKLPSVAELAVGDACTGSNPRPITPAEMEKLLTCCYYDKEVDF

SEQ ID NO: 343 - protein, 395 aa, Clostridiales bacterium
MRFTLPRDLYHGKDAIEALKTLTGKKAFVVVGGGSMKRFGFLDKVVDYLKEAGMEVELFEGVEPDPSVETVMKGAKAMEVFQPDWIVAMGGGSPIDAAKAMWAFYEYPDTSFDDLIIPFNFPTLRTKAKFCAIPSTSGTATEVTAFSVITDYSKGIKYPLADFNITPDVAIVDPALAETMPKKLTAHTGMDAMTHAIEAYVSTLNCEYTDPLALHAIEMINGYLIPSYNGDMEARDKMHDAQCLAGMAFSNALLGIVHSMAHKTGAAYSGGHIVHGCANAMYLPKVIKYNSKEPEAAARYAKIARFINLEGNTDEELTDALIARIREMNKALDIPTCIRDYEGGIIDEKEFMDKLPTVAELAVGDACTGSNPRAITPAEMEKLLKCCFYDEEVTF

SEQ ID NO: 344 - protein, 388 aa, Clostridium celatum; identical to SEQ ID NO: 215

SEQ ID NO: 345 - protein, 388 aa, Clostridium saccharobutylicum
MMRFTLPRDIYYGKGSLEQLKNLKGKKAMLVLGGGSMKRFGFVDKVLGYLKEAGIEVKLIEGVEPDPSVETVFKGAELMRQFEPDWIIAMGGGSPIDAAKAMWIFYEHPEKTFDDIKDPFTVPELRNKAKFLAIPSTSGTATEVTAFSVITDYKTEIKYPLADFNITPDVAVVDSELAETMPPKLTAHTGMDALTHAIEAYVATLHSPFTDPLAMQAIEMINEHLFKSYEGDKEAREQMHYAQCLAGMAFSNALLGICHSMAHKTGAVFHIPHGCANAIYLPYVIKFNSKTSLERYAKIAKQISLAGNTNEELVDSLINLVKELNKKMQIPTTLKEYGIHEQEFKNKVDLISERAIGDACTGSNPRQLNKDEMKKIFECVYYGTEVDF

SEQ ID NO: 346 - protein, 403 aa, Ruminococcus bromii
MYRFTLPRDLYHGEDALSSLKNLSGKKAVVVVGGGSMKRFGFLDKAVDYLKEAGMEVKLIEGVEPDPSVETVMKGAAVMREFEPDWIVAMGGGSPIDAAKAMWVFYEYPNTTFEEIITPFSFPTLRTKAKFCAIPSTSGTATEVTAFSVITDYAKGIKYPLADFNITPDVAIVDPALAETMPAKLTAHTGMDAMTHAIEAYVSTLNCEYTDPLALHAIEMIHDNLKKSYEGDMACRDKMHDAQCLAGMAFSNALLGIVHSMAHKTGAAFTGGHIIHGCANAMYLPKVIKYNSKDPVAAERYAKIAKFINLKGETTEELVDALIAELRSMNDQLNIPQGIKNYGPGGVKADESIIDEKEFLEKLPEVAKNAIADACTGSNPRQPNQEEMEKLLKACYYDTEIDF

SEQ ID NO: 347 - protein, 388 aa, Clostridium botulinum
MERFTLPRDLYFGEGSLEALKTLKGKKAVVVVGGGSMKRFGFLDKVQSYLNEAGIEVKLIEGVEPDPSVETVMNGAAVMREFEPDLIVSIGGGSPIDAAKAMWIFYEYPDFTFEQAVVPFGIPELRQKARFVAIPSTSGTATEVTAFSVITDYKKKIKYPLADFNLTPDIAIVDPDLAQTMPAKLTAHTGMDALTHAIEAYVAGLRSVFSDPLAMQAIVMVKEYLVKSYNGNKEARGQMHLAQCLAGMAFSNALLGITHSMAHKTGAVFHIPHGCANAIFLPYVIQYNSESCGERYATIAKKLGLAGENQDELVKSLIEMIREMNKTMNIPLNLKEYGITEEDFKENVKYISHNAVLDACTGSNPREINDETMEKLFACTYYGEDVTF

SEQ ID NO: 348 - protein, 388 aa, Clostridium butyricum
MARFTLPRDLYHGEGALEALKTLKGKKAFVVVGGGSMKRFGFLQKVEDYLKEAGMEVELFEGVEPDPSVETVMKGAEAMRNFEPDWIVAMGGGSPIDAAKAMWIFYEYPDFTFEQAVVPFGLPDLRQKAKFVAIPSTSGTATEVTAFSVITNYTEKIKYPLADFNLTPDVAIVDPALAQTMPAKLVAHTGMDALTHAIEAYTASLRSNFSDPLAIKAIEMVNENLVKSYEGDKVARDLMHEAQCLAGMSFSNALLGIVHSMAHKVGAVFHIPHGCANAIFLPYVIQYNRKSCEDRYADIARALKLEGNTDAELTDSLIKLINEFNNKLSIPHSMKEYGIEEAEFKANLEFIAHNAVLDACTGSNPREIDDATMAKLFECTYYGTEVNL

SEQ ID NO: 349 - protein, 388 aa, Clostridium sp.
MNRFTLPRDIYYGENSLEVLKTLEGKKAIVVTGGSSMRKNGFLDKIINFLEEAKIEVKLFEGVEPDPSIETVMKGAEMMREFAPEWIVAVGGGSPIDAAKAMWVFYEHPELTFDDIKDPFTIPALRKKAKFVAIPSTSGTATEVTAFSVITDYKKKIKYPLADFNITPDIAILDTELTMTMPKKLVAHTGMDALTHAIEAYVATNKSHFSDPLAMEAIIMIEDNILKSYEGVKEARDEMHNAQCLAGMAFSNALLGITHSMAHKTGAVFHIPHGCANAIFLPYVIQFNKKACGERYAKIARTLGLAGGNEEELINSLIDCIRQLNKAMEIPLTLKEYGVEKEEFDKYIDFISENAVVDACTASNPREISVDEMKKIFECTFDGVDVEF

SEQ ID NO: 350 - protein, 428 aa, Clostridiales sp.
  Butyrate-producing bacterium SSC/2
MMYNVFVAKQSIEIGYSNVGYIRKGSISVIQVKEMLVMARFTLPRDLYFGENALETLKTIKGNKAVLCLGGGSMKRFGFVDKVVEYLKEAGIETKLIEGIEPDPSVETVMKGAKVMQEFEPDLIIAMGGGSPIDAAKAMWVFYEHPETTFDDIKDPFTIPPLRNKATFIAIPSTSGTATEVTAFSVITDYSTGIKYPLADFEITPDVAIVDPSLAETMPQTLTAHTGMDALTHAIEAYVAGLHSPFSDPLAIHAIEMIFDNLKASYEGDMQARGNMHIAQCLAGMAFSNALLGIVHSLAHKTGAVFDTGHIPHGCANAIYLPYVIQYNAKVCEDRFAMIARKLGLPGVTDKALTLSLIKAVEDLRTSLHIVSNLKEFGVKEDEFLEKKHMIAERAVGDACTGSNPRETSVEDMEKILECIYYGKDVTF

SEQ ID NO: 351 - protein, 388 aa, Clostridium botulinum
MERFTLPRDLYFGEGSLEALKTLKGKKAVVVVGGGSMKRFGFLDKVQSYLNEAGIEVKLIEGVEPDPSVETVMNGAAVMREFEPDLIVSIGGGSPIDAAKAMWIFYEYPDFTFEQAVVPFGIPELRQKARFVAIPSTSGTATEVTAFSVITDYKKKIKYPLADFNLTPDIAIVDPDLAQTMPAKLTAHTGMDALTHAIEAYVAGLRSVFSDPLAMQAIVMVKEYLVKSYNGNKEARGQMHLAQCLAGMAFSNALLGITHSMAHKTGAVFHIPHGCANAIFLPYVIQYNYKSCGERYATIAKKLGLAGENQDELVKSLIEMIREMNKTMNIPLNLKEYGITEEDFKENVKYISHNAVLDACTGSNPREINDEAMEKLFACTYYGEDVTF

SEQ ID NO: 352 - protein, 388 aa, Clostridium botulinum
MERFTLPRDLYFGEGSLEALKTLKGKKAVVVVGGGSMKRFGFLDKVQSYLNEAGIEVKLIEGVEPDPSVETVMNGAAVMREFEPDLIVSIGGGSPIDAAKAMWIFYEYPDFTFEQAVVPFGIPELRQKARFVAIPSTSGTATEVTAFSVITDYKKKIKYPLADFNLTPDIAIVDPDLAQTMPAKLTAHTGMDALTHAIEAYVAGLRSVFSDPLAIQAIVMVKEYLVKSYNGNKEARGQMHLAQCLAGMAFSNALLGITHSMAHKTGAVFHIPHGCANAIFLPYVIQYNSKSCGERYATIAKKLGLAGENQDELVKSLIEMIREMNKTMNIPLNLKEYGITEEDFKENVKYISHNAVLDACTGSNPREINDETMEKLFACTYYGEDVTF

SEQ ID NO: 353 - protein, 388 aa, Clostridium kluyveri
MGRFTLPRDIYFGENALENLKNLDGNRAVIVVGGGSMKRFGFLNKVEEYLKKAGIEVKLIEGVEPDPSVDTVINGAKIMRDFKPDWIVAMGGGSPIDAAKAMWIFYEYPDFTFEKAIVPFGLPKLRGKAQFVAIPSTSGTATEVTAFSVITDYKSKIKYPLADFNLTPDAAIIDPALAETMPKKLTAHTGMDALTHAIEAYVASLHSDFSDPLAMHAIIMIHKYLLKSYEADKEARGHMHIAQCLAGMAFSNALLGITHGIAHKTGAVFHIPHGCANAIYLPYVIDFNKKVCSEKYVEIAKRLKLPGNNEDELIDSLTEMIRNMNKKMDIPLTIKEYGISEIDFNENLDFIAHNAIMDACTGSNPRKITEEEMRKLLQYMYNGRKVNF

SEQ ID NO: 354 - protein, 393 aa, Clostridium leptum
MSRFTLPRDIYYGKGSIDELKNLKGKKAIVVVGGGSMKRFGFLDKVVNNLHEAGIETMLFEGVEPDPSVETVMKGAKAMQEFQPDWIVSIGGGSPIDAAKAMWAFYEYPDTKFEDLITPFGFPTLRQKAKFLAIPSTSGTATEVTAFSVITDYHKGIKYPLADFNITPDVAIVDPDLAETMPPKLTAHTGMDALTHAIEAYVSTLNSPFTDPLALKAISMVFEYLPDSYNGNMAAREQMHYAQCLAGMAFSNALLGIVHSMAHKTGAAYSTGHIPHGCANAIYLPYVIQYNAKDATAKKRYAAIAKSVGLAGNTDDELVAALCAKIDDYNVKLNIPKTLKDFGINEAEFLEKLPEVAANAVGDACTGSNPRSITPAQMEQLLKATYYGTKVDF

SEQ ID NO: 355 - protein, 388 aa, Clostridium botulinum
MARFTLPRDLYHGEGSLETLKTLKGKKAFVVVGGGSMKRFGFLQKVEDYLKEAGMEVQLFEGVEPDPSVETVMKGAEAMRNFQPDWIVAMGGGSPIDAAKAMWIFYEYPDFTFEQAVVPFGLPDLRQKAKFVAIPSTSGTATEVTAFSVITDYKAKIKYPLADFNITPDIAIVDPELAQTMPAKLVAHTGMDALTHAIEAYTASLRSNFSDPLAIKAIEMVNENLVKSFEGDKEARNLMHEAQCLAGMAFSNALLGIVHSMAHKVGAVFHIPHGCANAIFLPYVIEYNRVECEDRYADIARALKLEGNTDAELTDSLIKLINDFNDKLNIPHSMKEYGVEEADFKANVEFIAHNAVLDACTGSSPRAIDDKTMEKLLGCTFYGTKVNF

SEQ ID NO: 356 - protein, 394 aa, Clostridium perfringens
MGGIISMARFTLPRDIYHGKDSLEVLKSLEGKKAFIVIGGGSMKRFGFLDKVLSYLKEANMETKVFEGVEPDPSVETVMKGAKEMEEFNPDWIVSIGGGSPIDAAKAMWIFYEYPDFTFEKAIVPFGLPKLRRKAKFVAIPSTSGTATEVTAFSVITDYKAKIKYPLADFEITPDIAIVDPSLAETMPEKLVAHTGMDALTHAIEAYTASLRSNFTDPLALKAIEMVNMHLVNSYKGDMEARGEMHEAQCLAGMAFSNALLGIVHSMAHKVGAVFHIPHGCANAIFLPYVIKYNRKACEDRYANIARHIGLKGESERELTDALIDLINKFNKELNIPSSMKEYGIEEDDFKANLKFIAHNAVLDPCTGSNPREIDDETMEKLYTCAYYGSDVDF

SEQ ID NO: 357 - protein, 388 aa, Clostridium perfringens
MARFTLPRDIYHGKDSLEVLKSLEGKKAFIVIGGGSMKRFGFLDKVLSYLKEANMETKVFEGVEPDPSVETVMKGAKEMEEFNPDWIVSIGGGSPIDAAKAMWIFYEYPDFTFEKAIVPFGLPKLRRKAKFVAIPSTSGTATEVTAFSVITDYKAKIKYPLADFEITPDIAIVDPSLAETMPEKLVAHTGMDALTHAIEAYTASLRSNFTDPLALKAIEMVNMHLVNSYKGNMEARGEMHEAQCLAGMAFSNALLGIVHSMAHKVGAVFHIPHGCANAIFLPYVIKYNRKACEDRYANIARHIGLKGESERELTDALIDLINKFNKELNIPSSMKEYGIEEDDFKANLKFIAHNAVLDPCTGSNPREIYDETMEKLYTCAYYGSDVDF

SEQ ID NO: 358 - protein, 386 aa, Clostridium carboxidivorans
MSRFTLPRDIYFGENTLETLKTLKGKKAIIVVGGGSMKKFGFLQKVEEYLKEAGMEIKLIEGVEPDPSVETVMKGAEIMRDFEPDWIVSIGGGSPIDAAKAMWIFYEYPEFTFEQAVVPFGIPDLRQKAKFVAIPSTSGTATEVTAFSVITDYKAKIKYPLADFNLTPDVAIIDPALAQTMPAKLTAHTGMDALTHAIEAYVAGLRSYFSDPLAMQAIVMTKDNLIKSYEGDKEARDEMHIAQCLAGMAFSNALLGITHSMAHKTGAVFHIPHGCANAIFLPYVIDFNKKTCKDRYATIAKTLGLAGNTDDELVDALTSMIQEMNKKMDIPLNLKEYGVTEEDFNENLDFIAHNAVLDACTGSNPRPITEEEIEKSIQMHIYWRES

SEQ ID NO: 359 - protein, 388 aa, Clostridium ljungdahlii
MGRFTLPRDIYFGENALENLKNLDGNKAVVVVGGGSMKRFGFLAKVEKYLKETGMEVKLIEGVEPDPSVDTVMNGAKIMRDFNPDWIVSIGGGSPIDAAKAMWIFYEYPDFTFEKAVVPFGIPKLRQKAQFVAIPSTSGTATEVTSFSVITDYKAKIKYPLADFNLTPDIAIIDPSLAETMPKKLTAHTGMDALTHAIEAYVASLHSDFSDPLAMHAITMIHKYLLKSYEEDKEARGHMHIAQCLAGMAFSNALLGITHSIAHKTGAVFHIPHGCANAIYLPYVIDFNKKACSERYAKIAKKLHLSGNSEDELIDSLTEMIRTMNKKMDIPLTIKDYGISENDFNENLDFIAHNAMMDACTGSNPRAITEEEMKKLLQYMYNGQKVNF

SEQ ID NO: 360 - protein, 395 aa, Clostridium citroniae
MRFTLPRDLYHGEHALDALKTLTGKKAFVVVGGGSMKRFGFLDKVVDYLKEAGMEVQLFEGVEPDPSVETVMKGAKAMEEFNPDWIVAMGGGSPIDAAKAMWAFYEYPDTSFEDLIIPFNFPTLRTKAKFCAIPSTSGTATEVTAFSVITDYSKGIKYPLADFNITPDVAIVDPALAETMPKKLTAHTGMDAMTHAIEAYVSTLNCEYTDPLALHAIEMINEYLIPSYNGDMEARDKMHNAQCLAGMAFSNALLGIVHSMAHKTGAAYSGGHIVHGCANAMYLPKVIKYNSKEPEAAARYAKIAKFINLPGTTDQELTDALIARIREMNKELDIPTCIRDYEGGIIDEKEFMEKLPAVAELAVGDACTGSNPRSITPAQMEKLLTCCFYDEEVTF

SEQ ID NO: 361 - protein, 388 aa, Lachnospiraceae bacterium; identical to SEQ ID NO: 214

SEQ ID NO: 362 - protein, 388 aa, Clostridium sporogenes
MERFTLPRDLYFGEGSLEALKTLKGKKAVVVVGGGSMKRFGFLDKVESYLNEAGIEVKLIEGVEPDPSVETVMNGAAVMREFEPDLIVSIGGGSPIDAAKAMWIFYEYPDFTFEQAVVPFGIPELRQKARFVAIPSTSGTATEVTAFSVITDYKKKIKYPLADFNLTPDIAIVDPDLAQTMPAKLTAHTGMDALTHAIEAYVAGLRSVFSDPLAMQAIIMVKEYLVKSYNGNKGARGQMHLAQCLAGMAFSNALLGITHSMAHKTGAVFHIPHGCANAIFLPYVIQYNAKSCGERYATIAKKLGLAGENQDELVKSLIEMIREMNKTMNIPSNLKEYGIAEEEFKENVKYISHNAVLDACTGSNPREIDDETMEKLFACTYYGEDVAF

SEQ ID NO: 363 - protein, 394 aa, Clostridium perfringens; identical to SEQ ID NO: 221

SEQ ID NO: 364 - protein, 388 aa, Clostridium saccharoperbutylacetonicum; identical to SEQ ID NO: 218

SEQ ID NO: 365 - protein, 388 aa, Clostridium perfringens
MARFTLPRDIYHGKDSLEVLKSLEGKKAFIVIGGGSMKRFGFLDKVLSYLKEANMETKVFEGVEPDPSVETVMKGAKEMEEFNPDWIVSIGGGSPIDAAKAMWIFYEYPDFTFEKAIVPFGLPELRRKAKFVAIPSTSGTATEVTAFSVITDYKAKIKYPLADFEITPDIAIVDPSLAETMPEKLVAHTGMDALTHAIEAYTASLRSNFTDPLALKAIEMVNMHLVNSYKGDMEARGEMHEAQCLAGMAFSNALLGIVHSMAHKVGAVFHIPHGCANAIFLPYVIKYNRKACEDRYANIARHIGLKGESERELTDALIDLINKFNKELNIPSSMKEYGIEEDDFKANLKFIAHNAVLDPCTGSNPREIDDETMEKLYTCAYYGSDVDF

SEQ ID NO: 366 - protein, 393 aa, Ruminococcus gnavus
MSRFCLPRDIYHGKGCLEELKNLKGKKAILVVGGGSMKRQGFLDRAVTYLKEAGMEVQLFEGVEPDPSVETVMKGAEAMRAFEPDWIVAMGGGSPIDAAKAMWAFYEYPDVTFEDLCIPFNFPELRQKAKFAAIPSTSGTATEVTAFSVITNYQTGVKYPLADFNITPDVAIVDPDLVAGLPVKQVAYTGMDALTHAIEAYVSTLNGPFTDPLALQAIEMVLDNLPASYNCDMDAREQMHYAQCLAGMAFSNALLGIVHSMAHKTGAAFSTGHIPHGCANAIYLPYVIKYNAKDPVAAKRYAEIARRMGLPGASEKALINSLVEKIDDFNVKLNIPKTLKDFGIEENEFKEKVAKIAELAVGDACTGSNPRAIDPATMEKLFTCTYYGTEVDF

SEQ ID NO: 367 - protein, 393 aa, Lachnospiraceae bacterium
MARFTLPRDIYHGKGCLEELKNLKGKKAILVVGGGSMKRQGFLDKAVNYLKEAGMEVQLFEGVEPDPSVETVMKGAEAMRAFGPDWIVAMGGGSPIDAAKAMWAFYEYPDVTFEDLCIPFNFPELRQKAKFAAIPSTSGTATEVTAFSVITDYAKGIKYPLADFNITPDVAIVDSELVEALPAHQVAYTGMDALTHAIEAYVSTLNCAYTDPLAIQAIEMVFDYLPASFKGNMEARAQMHNAQCLAGMAFSNALLGIVHSMAHKTGAAFSTGHITHGLANAMYLPYVIKYNAKDPVAAKRYAEIARRVGLAGASERALINSLCEKINEFNVILGIPATLKEFGIKEDEFKEKISEIAKNAVGDACTGSNPRAIDPETMERLFTCIYYGTEVDF

SEQ ID NO: 368 - protein, 391 aa, Lachnospiraceae bacterium
MARFTLPRDLYFGENALETLKTIKGNKAVLCLGGGSMKRFGFVDKVVEYLKEAGIETKLIEGIEPDPSVETVMKGAKVMQEFEPDLIIAMGGGSPIDAAKAMWVFYEHPETTFDDIKDPFTIPPLRNKATFIAIPSTSGTATEVTAFSVITDYSTGIKYPLADFEITPDVAIVDSSLAETMPQTLTAHTGMDALTHAIEAYVAGLHSPFSDPLAIHAIEMIFDNLKASYEGDMQARGNMHIAQCLAGMAFSNALLGIVHSLAHKTGAVFDTGHIPHGCANAIYLPYVIQYNAKVCEDRFAMIARKLGLPGVTDKALTLSLIKAVEDLRTSLHIVSNLKEFGVKEDEFLEKKHMIAERAVGDACTGSNPRETSVEDMEKILECIYYGKDVTF

SEQ ID NO: 369 - protein, 388 aa, Clostridium carboxidivorans
MSRFTLPRDIYFGENSLEVLKTLKGKKAVVVVGGGSMKKFGFLQKVEEYLKEAGIKIKLIEGVEPDPSVETVMNGAKVMREFQPDLIVAIGGGSPIDAAKAMWIFYEYPDFTFEKAVIPFGIPDLRQKAKFVAIASTSGTATEVTAFSVITDYKAKIKYPLADFNLTPDIAIVDPALAQTMPPKLTAHTGMDALTHAIEAYVASSRSYISDPLAIQAITMIQEFLIKSYEGDKEARGEMHVAQCLAGMAFSNALLGIAHSMAHKTGAVFHIPHGCANAIFLPYVIDFNKKSCGDRYANIAKALGFNGKTKDELIDDLTDFVKTLNKKMNIPQTLKDYGIKEADFNANLDFIAHNAMGDACTGSNPRAITEAEMKKLFQCTFTGEKVEF

SEQ ID NO: 370 - protein, 388 aa, Clostridium butyricum
MARFTLPRDIYHGEGSLEVLKTLKGKKAFVVVGGGSMKRFGFLQKVEDYLKEAGMEVELFEGVEPDPSVETVMKGAEAMRKFQPDWIVAMGGGSPIDAAKAMWIFYEYPDFTFEQAVVPFGLPELRQKAKFVAIPSTSGTATEVTAFSVITNYTEKIKYPLADFNITPDIAIVDPELAQTMPAKLVAHTGMDALTHAIEAYTASLRSNFSDPLAIKAIEMVNENLVKSFEGDKTARNLMHEAQCLAGMAFSNALLGIVHSMAHKVGAVFHIPHGCANAIFLPYVIKYNRKVCEDRYADIARALKLEGNTDAELTDSLIKLINEFNDDLSIPHSMKEYGVEEADFKSNVKFIAHNAILDACTGSSPREIDEETMEKLFECTYYGTDVNF

SEQ ID NO: 371 - protein, 388 aa, Clostridium perfringens
MARFTLPRDIYHGKDSLEVLKGLEGKKAFIVIGGGSMKRFGFLDKVLSYLKEAGMETKVFEGVEPDPSVETVMKGAKEMEEFNPDWIVSIGGGSPIDAAKAMWIFYEYPDFTFEKAIVPFGLPKLRRKAKFVAIPSTSGTATEVTAFSVITDYKAKIKYPLADFEITPDIAIVDPSLAETMPEKLVAHTGMDALTHAIEAYTASLRSNFTDPLALKAIEMVNMHLVNSFKGDMEARGEMHEAQCLAGMAFSNALLGIVHSMAHKVGAVFHIPHGCANAIFLPYVIKYNRKACEDRYAQIARHIGLKGESERELTDALVDLINKFNKELNIPSSMKEYGIDENEFKANLKFIAHNAVLDPCTGSNPREVDDETMEKLYTCAYYGSDVDF

SEQ ID NO: 372 - protein, 388 aa, Clostridium botulinum
MERFTLPRDLYFGEGSLEALKTLKGKKAVVVVGGGSMKRFGFLDKVQSYLNEADIEVKLIEGVEPDPSVETVMNGAAVMREFEPDLIVSIGGGSPIDAAKAMWIFYEYPDFTFEQAVVPFGIPELRQKARFVAIPSTSGTATEVTAFSVITDYKKKIKYPLADFNLTPDIAIVDPDLAQTMPAKLTAHTGMDALTHAIEAYVAGLRSVFSDPLAMQAIVMVKEYLVKSYNGNKEARGQMHLAQCLAGMAFSNALLGITHSMAHKTGAVFHIPHGCANAIFLPYVIQYNSESCGERYATIAKKLGLAGENQDELVKSLIEMIREMNKTMNIPLNLKEYGITEEDFKENVKYISHNAVLDACTGSNPREINDETMEKLFACTYYGEDVTF

SEQ ID NO: 373 - protein, 388 aa, Clostridium botulinum
MERFTLPRDLYFGKGSLEALKTLKGKKAVVVVGGGSMKRFGFLDKVQSYLNEAGIEVKLIEGVEPDPSVETVMNGAAVMREFEPDLIVSIGGGSPIDAAKAMWIFYEYPDFTFEQAVIPFGIPELRQKARFVAIPSTSGTATEVTAFSVITDYKKKIKYPLADFNLTPDIAIVDPDLAQTMPAKLTAHTGMDALTHAIEAYVAGLRSVFSDPLAMQAIVMVKEYLVKSYNGNKEARGQMHLAQCLAGMAFSNALLGITHSMAHKTGAVFHIPHGCANAIFLPYVIQYNSKSCGERYATIAKKLGLAGENQDELVKSLIEMIREMNKTMNIPLNLKEYGIAEEDFKENVKYISHNAVLDACTGSNPREINDETMEKLFACTYYGEDVTF

SEQ ID NO: 374 - protein, 393 aa, Lachnospiraceae bacterium
MSRFTLPRDIYHGKGCLEELKNLKGKRAILVVGGGSMKRQGFLDKAVNYLKEAGMEVQLFEGVEPDPSVETVMKGAEAMRAFEPDWIVAMGGGSPIDAAKAMWAFYEYPDVTFEDLCIPFNFPELRQKAKFAAIPSTSGTATEVTAFSVITDYAKGIKYPLADFNITPDVAIVDSELVEGLPAHQVAYTGMDALTHAIEAYVSTLNCAYTDPLAIQAIEMVFDYLPASFRGNMTARAKMHDAQCLAGMAFSNALLGIVHSMAHKTGAAFSTGHITHGLANAMYLPYVIKYNAKDPVAAKRYAEIARRVGLEGSSEQSLINSLCEKINEFNVILGIPATLKEFGIKEDEFKEKVSAVAENAVGDACTGSNPRAIDPATMERLFTCIYYGTEVDF

SEQ ID NO: 375 - protein, 393 aa, Flavonifractor plautii
MSRFTLPRDIYYGANALENLKNLKGSRVVLVLGGGSMKKFGFVDKALGYLKEAGIETRLIENVEPDPSVETVMSGAAVMREFEPDWIISMGGGSPIDAAKAMWAFYEYPETTFEDLITPFSFPELRQKARFCAIPSTSGTATEVTAFSVITDYQKGIKYPLADFNITPDVAIIDPALAETMPPKLVAHTGMDALTHAIEAYVSTLHTVFTDPLALKAIHIVEKDLLRSFNGDMGCREEMHYGQCLAGMAFSNALLGIVHSMAHKTGAAFSTGHITHGLANAMYLPYVIAYNAKADGVAERYADIARTMGVVGDTTAELVEGLRAKIRSMNDAMGIPNTLKDFGIIEDEFKEKLDAIAANAVGDACTGSNPRPIDPATMAKLFTCIYYGTEVDF

SEQ ID NO: 376 - protein, 395 aa, Clostridium bolteae
MRFTLPRDLYHGKDALEALKTLAGKKAIVVVGGGSMKRFGFLDKVVDYLKEAGMEVQLFEGVEPDPSVDTVLKGAAAMQEFEPDWIVAVGGGSPIDAAKAMWAFYEYPDTSFEDLITPFSFPTLRTKAKFCAISSTSGTATEVTAFSVITDYKKGIKYPLADFNITPDVAIVDPALAETMPKKLTAHTGMDAMTHAIEAYVSTLHCEYTDPLALHAIEMINEYLIPSYNGDMEARDKMHDAQCLAGMAFSNALLGIVHSMAHKTGAAYSGGHIVHGCANAMYLPKVIKFNSKEPEAAARYAKIAKFINLPGTTDEELTDALIARLLEMNKALDIPACIKDYEGGIIDEKEFMDKLPKVAELAVGDACTGSNPRTITPEVMEQLLKCCYYDEEVDF

SEQ ID NO: 377 - protein, 397 aa, Clostridium kluyveri
MNSIMRRKVMGRFTLPRDIYFGENALENLKNLDGNRAVIVVGGGSMKRFGFLNKVEEYLKKAGIEVKLIEGVEPDPSVDTVINGAKIMRDFKPDWIVAMGGGSPIDAAKAMWIFYEYPDFTFEKAIVPFGLPKLRGKAQFVAIPSTSGTATEVTAFSVITDYKSKIKYPLADFNLTPDAAIIDPALAETMPKKLTAHTGMDALTHAIEAYVASLHSDFSDPLAMHAIIMIHKYLLKSYEADKEARGHMHIAQCLAGMAFSNALLGITHGIAHKTGAVFHIPHGCANAIYLPYVIDFNKKVCSEKYVEIAKRLKLPGNNEDELIDSLTEMIRNMNKKMDIPLTIKEYGISEIDFNENLDFIAHNAIMDACTGSNPRKITEEEMRKLLQYMYNGRKVNF

SEQ ID NO: 378 - protein, 394 aa, Clostridium perfringens
MGGIISMARFTLPRDIYHGKDSLEVLKSLEGKKAFIVIGGGSMKRFGFLDKVLSYLKEANMETKVFEGVEPDPSVETVMKGAKEMEEFNPDWIVSIGGGSPIDAAKAMWIFYEYPDFTFEKAIVPFGLPKLRRKAKFVAIPSTSGTATEVTAFSVITDYKAKIKYPLADFEITPDIAIVDPSLAETMPEKLVAHTGMDALTHAIEAYTASLRSNFTDPLALKAIEMVNMHLVNSFKGDMEARGEMHEAQCLAGMAFSNALLGIVHSMAHKVGAVFHIPHGCANAIFLPYVIKYNRKACEDRYANIARHIGLKGESERELTDALIDLINKFNKELNIPSSMKEYGIDENEFKTNLKFIAHNAVLDPCTGSNPREVDDETMEKLYTCAYYGSDVDF

SEQ ID NO: 379 - protein, 388 aa, Clostridium sp.
MARFTLPRDLYHGEGALEVLKTLKGKKAFVVVGGGSMKRFGFLKQVEDYLTEAGMEVELFEGVEPDPSVETVMKGAEAMRNFEPDWIVAMGGGSPIDAAKAMWIFYEYPEFTFEQAVVPFGLPELRQKAKFVAIPSTSGTATEVTAFSVITNYTEKIKYPLADFNITPDIAIVDPVLAQTMPKTLTAHTGMDALTHAIEAYTASLRSNFSDPLAIKALQMVQQNLLKSFEGDKEARNLMHEAQCLAGMAFSNALLGIVHSMAHKVGAVFHIPHGCANAIFLPYVIQYNRTKCEDRYADIARALKLEGSTDSELTDSLIGMINKMNSDLNIPHSMKEYGVTEDDFKANLSFIAHNAVLDACTGSNPREIDDATMEKLFECTYYGTKVEL

SEQ ID NO: 380 - protein, 388 aa, Clostridium colicanis
MARFTLPRDLYHGKGSLEVLKSIKGKKAFVVVGGGSMKRFGFLDKVESYLKEAGIEVEIFEGVEPDPSVETVMKGAEAMRKFQPDWIVAMGGGSPIDAAKAMWIFYEYPDFTFEKAVVPFGLPELRQKAKFIAIPSTSGTATEVTAFSVITNYTEKIKYPLADFNLTPDIAIVDPDLAQTMPKKLVAHTGMDALTHGIEAYTASLRSNFSDPLAAKGIKMVVENLLKSFEGGEKAREEMHDAQCLVGMAFSNALLGIVHSMAHKTGAVFHIPHGCANAIFLPYVIKYNRKNCEDRYADIARMLKLEGNTDSELTDSLINLINEMNTNLEIPHTMKEYGVEEEDFKDNLEFISKNAVLDACTGSNPREIDDKTMEKLFTCAYYGTEVDF

SEQ ID NO: 381 - protein, 388 aa, Clostridium botulinum
MERFTLPRDLYFGEGSLEALKTLKGKKAVVVVGGGSMKRFGFLDKVQSYLNEAGIEVKLIEGVEPDPSVETVMNGAAVMREFEPDLIVSIGGGSPIDAAKAMWIFYEYPEFTFEQAVIPFGIPELRQKARFVAIPSTSGTATEVTAFSVITDYKKKIKYPLADFNLTPDIAIVDPDLAQTMPAKLTAHTGMDALTHAIEAYVAGLRSVFSDPLAMQAIVMVKEYLVKSYNGNKEARGQMHLAQCLAGMAFSNALLGITHSMAHKTGAVFHIPHGCANAIFLPYVIQYNSKSCGERYATIAKKLGLAGENQDELVKSLIEMIREMNKTMNIPSNLKEYGITEEDFKENVKYISHNAVLDACTGSNPREINDETMEKLFACTYYGEEVTF

SEQ ID NO: 382 - protein, 388 aa, Clostridium ljungdahlii
MARFTLPRDIYFGENSLETLKDLDGKKAVIVVGGGSMKRFGFLDKVVNYLKEAGIESKLIEGVEPDPSVETVMNGAKLMREYEPDLIVSIGGGSPIDAAKAMWIFYEYPEFTFKEAVVPFGLPKLRQKATFIAIPSTSGTATEVTAFSVITDYKAKIKYPLADFNLTPDIAIIDPALAQTMPPKLTAHTGMDALTHAIEAYVAGLHSVFSDPLAIQAIVMVNQYLIKSYNEDKEARNQMHLAQCLAGMAFSNALLGITHSLAHKTGAVFHIPHGCANAIYLPYVIDFNKKACAPRYAEIARSLKLPGNTDDELVDSLTNMIKDMNKSMDIPLTLKDYGVDEKEFKDSEDFIAHNAVLDACTGSNPRSINDTEMKKLLEYIYYGKKVDF

SEQ ID NO: 383 - protein, 388 aa, Clostridium cellulovorans
MNRFTLPRDLYFGKGSMEQLKNLKGKKAVIVVGGGSMKKFGFLDKAIGYLQEAGIETRLIEGVEPDPSVETVFKGAEAMREFEPDWIISIGGGSPIDAAKAMWVFYEHPELTFDDIKDPFTIPELRNKAKFVAIPSTSGTATEVTAFSVITDYKTEIKYPLADFNITPDIAIVDSELAETMPKTLTAHTGMDALTHAIEAYVAGLHSDFSDPLAIKAIEMIYDELLKSYNEDKDAREKMHYAQCLAGMAFSNALLGITHSMAHKTGAVFHIPHGCANAIYLPYVIEFNKKVAAERYADIAKRIGLKGETTDELVDALVKSIRDLNVKMDIPLTLKDYGIDEALFKEKVALISERAIGDACTGSNPRTITVTEMEKLFNCTYYGIKVDF

SEQ ID NO: 384 - protein, 393 aa, Lachnospiraceae bacterium
MSRFCLPRDIYHGKGCLEELKNLKGKKAILVVGGGSMKRQGFLDRAVGYLKEAGMEVQLFEGVEPDPSVETVMKGAEAMRAFEPDWIVSMGGGSPIDAAKAMWAFYEYPDTTFEELCTPFNFPELRQKAKFCAIPSTSGTATEVTAFSVITNYQTGVKYPLADFNITPDVAIVDPDLVAGLPVKQVAYTGMDALTHAIEAYVSTLNGPFTDPLALQAIEMVLDYLPASYNCNMDAREQMHYAQCLAGMAFSNALLGIVHSMAHKTGAAFSTGHIPHGCANAIYLPYVIQYNAKDSVAAKRYAEIARRMGLEGNSEKALINSLVAKIDEFNAKLNIPKTLKDFGINEEEFKEKIAKISELAVGDACTGSNPRAIDPAAMEKLFTCTYYGTEVDF

SEQ ID NO: 385 - protein, 393 aa, Clostridium sp.
MSRFTLPRDVYHGKGCLEELKNLRGKKAIIVVGGGSMKRQGFLDRAVGYLKEAGMEVELFEGVEPDPSVETVMKGAEAMRAFEPDWIVSMGGGSPIDAAKAMWAFYEYPDVTFEDLCIPFNFPELRQKAKFCAIPSTSGTATEVTAFSVITNYSTGVKYPLADFNITPDVAIVDPDLVTGLPVKQVAYTGMDALTHAVEAYVSTLNGPFTDPLALQAIEMVLDYLPASYHCNMDAREQMHYAQCLAGMAFSNALLGIVHSMAHKTGAAFSTGHIPHGCANAIYLPYVIKYNAKEPTAASRYAEIARRMGLEGTSEKALINSLCAKIDAFNVELNIPKTLKDFGINEDEFKEKVAKIAELAVGDACTGSNPRAIDPAAMEQLLTCTYYGTEVDF

SEQ ID NO: 386 - protein, 388 aa, Clostridium butyricum
MARFTLPRDIYHGEGSLEVLKTLKGKKAFVVVGGGSMKRFGFLQKVENYLKEAGMEVELFEGVEPDPSVETVMKGAEAMRKFQPDWIVAMGGGSPIDAAKAMWIFYEYPDFTFEQAVVPFGLPELRQKAKFVAIPSTSGTATEVTAFSVITNYTEKIKYPLADFNITPDIAIVDPELAQTMPAKLVAHTGMDALTHAIEAYTASLRSNFSDPLAIKAIEMVSENLVKSFEGDKTARNLMHEAQCLAGMAFSNALLGIVHSMAHKVGAVFHIPHGCANAIFLPYVIKYNRKVCEDRYADIARALKLEGNTDSELTDSLIKLINEFNDDLSIPHSMKEYGVEEADFKSNVKFIAHNAILDACTGSSPREIDEETMEKLFECTYYGTDVNF

SEQ ID NO: 387 - protein, 388 aa, Clostridium botulinum
MARFTLPRDLYHGEGSLETLKTLKGKKAFVVVGGGSMKRFGFLQKVEDYLKEAGMEVQLFEGVEPDPSVETVMKGAEAMRNFEPDWIVAMGGGSPIDAAKAMWIFYEYPDFTFEQAVVPFGLPDLRQKAKFVAIPSTSGTATEVTAFSVITDYKAKIKYPLADFNITPDIAIVDPELAQTMPAKLVAHTGMDALTHAIEAYTASLRSNFSDPLAIKAIEMVNEHLVKSFEGDKEARNLMHEAQCLAGMAFSNALLGIVHSMAHKVGAVFHIPHGCANAIFLPYVIQYNRIECEDRYGDIARALKLEGNTDAELTDSLIKLINDFNDALNIPHSMKEYGVEEADFKANVEFIAHNAVLDACTGSSPRAIDDKTMEKLLGCTFYGTKVNF

SEQ ID NO: 388 - protein, 328 aa, Clostridium botulinum
MERFTLPRDLYFGEGSLEALKTLKGKKAVVVVGGGSMKRFGFLDKVQSYLNEAGIEVKLIEGVEPDPSVETVMNGAAVMREFEPDLIVSIGGGSPIDAAKAMWIFYEYPDFTFEQAVVPFGIPELRQKARFVAIPSTSGTATEVTAFSVITDYKKKIKYPLADFNLTPDIAIVDPDLAQTMPAKLTAHTGMDALTHAIEAYVAGLRSVFSDPLAMQAIVMVKEYLVKSYNGNKEARGQMHLAQCLAGMAFSNALLGITHSMAHKTGAVFHIPHGCANAIFLPYVIQYNSESCGERYATIAKKLGLAGENQDELVKSLIEMIREMNKTM

SEQ ID NO: 389 - protein, 393 aa, Ruminococcus torques
MSRFCLPRDIYHGKGCLEELKNLKGKKAILVVGGGSMKRQGFLDKAVNYLKEGGMEVQLFEGVEPDPSVETVMKGAEAMRAFEPDWIVAMGGGSPIDAAKAMWAFYEYPEISFEDLITPFSFPELRQKAKFAAIPTTSGTATEVTAFSVITNYQTGVKYPLADFNITPDVAIVDPDLVAGLPVKQVAYTGMDALTHAIEAYVSTLNGPFTDPLALQAIEMVLDYLPGSYKCDMVAREQMHYAQCLAGMAFSNALLGIVHSMAHKTGAAFSTGHIPHGCANAIYLPYVIKYNAKDAVAAKRYAEIARRMGLAGTSEQALINSLVEKIDEFNVRLNIPKTLKDFGINEEEFKEKVDKIAELAVGDACTGSNPRAIDPAAMAKLLTCTYYGTEVDF

SEQ ID NO: 390 - protein, 388 aa, Clostridium carboxidivorans; identical to SEQ ID NO: 216

SEQ ID NO: 391 - protein, 388 aa, Clostridium beijerinckii
MARFTLPRDLYHGEGALEVLKTLKGKKAFVVVGGGSMKRFGFLKQVEDYLTEAGMEVELFEGVEPDPSVETVMKGAEAMRNFEPDWIVAMGGGSPIDAAKAMWIFYEYPDFTFEQAVVPFGLPELRQKAKFVAIPSTSGTATEVTAFSVITNYTEKIKYPLADFNITPDIAIVDPVLAQTMPKTLTAHTGMDALTHAIEAYTASLRSNFSDPLAIKALQMVQENLIKSFEGDKEARNLMHEAQCLAGMAFSNALLGIVHSMAHKVGAVFHIPHGCANAIFLPYVIQYNRTKCEDRYGDIARALKLKGNNDAELTDSLIELINGLNDKLEIPHSMKAYGVTEEDFKANLSFIAHNAVLDACTGSNPREIDDATMEKLFECTYYGTKVNL

SEQ ID NO: 392 - protein, 388 aa, Clostridium carboxidivorans
MSRFTLPRDLYFGDNSLAELKNLKGKKAVVVVGGGSMKKFGFLEKVENYLKEAGMEVKLIEGVEPDPSVETVFNGAQVMRDFEPDWIVSIGGGSPIDAAKAMWIFYEYPDFTFEQAVIPFGIPELRQKARFVAIPSTSGTATEVTAFSVITDYKARIKYPLADFNLTPDVAIIDPALAQTMPPKLTAHTGMDALTHAIEAYVASARSHFSDPLAMQAIVMVREHLIKSYSGDKEARNEMHIAQCLAGMAFSNALLGIVHSMAHKSGAVFHIPHGCANAIYLPYVIQFNRKASESRFAVIAKTLGLDGNTDADLTDSLVAMIRDMNKQLDIPLTLKDYGITEEDFNENVDFISKNALTDACTGSNPREIDFDQMKKLFQCTFTGEDCTF

SEQ ID NO: 393 - protein, 388 aa, Clostridium sp.
MMRFTLPRDIYYGKGCLEQLKTLKGQRAVLALGGGSMKKFGFVDKALEYLKEAGIEVKLIEGIEPDPSVETVLKGAEVMRDFKPDWIIAMGGGSPIDAAKAMWVFYEHPEKTFDDIKDPFTIPELRSKAKFLAIPSTSGTATEVTAFSVITDYKTEIKYPLADFNITPDVAIVDSELAETMPAKLTAHTGMDALTHAIEAYVATLHSPFTDPLALQAIEMINEYLLKSYDGDKDAREQMHYAQCLAGMAFSNALLGITHSMAHKTGAVFHIPHGCANAIYLPYVIDFNKKAALDRYAKIAKRLGLSGTSDDELVDSLTSLIKELNKKMAIPSTLKEYGIDEEEFKAKVDLISERAIGDACTGSNPRQINKDEMKKIFECVYYGNKVEF

SEQ ID NO: 394 - protein, 396 aa, Ruminococcus torques
MSEMSRFCLPRDIYHGKGCLEELKNLKGKKAILVVGGGSMKRQGFLDRAVGYLKEAGMEVQLFEGVEPDPSVETVMKGAEAMRAFEPDWIVSMGGGSPIDAAKAMWAFYEYPDTTFEELCTPFNFPELRQKAKFCAIPSTSGTATEVTAFSVITNYQTGVKYPLADFNITPDVAIVDPDLVAGLPVKQVAYTGMDALTHAIEAYVSTLNGPFTDPLALQAIEMVLDYLPASYNCNMDAREQMHYAQCLAGMAFSNALLGIVHSMAHKTGAAFSTGHIPHGCANAIYLPYVIQYNAKDSVAAKRYAEIARRMGLEGNSEKALINSLVAKIDEFNAKLNIPKTLKDFGINEEEFKEKIAKISELAVGDACTGSNPRAIDPAAMEKLFTCTYYGTEVDF

SEQ ID NO: 395 - protein, 396 aa, Clostridium saccharolyticum
MARFTLPRDLYHGKGALEELKNIKGKKAIVVVGGGSMKRFGFLDRVEACLKEAGMEVKLFEGVEPDPSVDTVMKGAEIMREFEPDWIVAIGGGSPIDAAKAMWAFYEYPETSFEDLCIPFNFPTLRTKARFCAIPSTSGTATEVTAFSVITDYKKGIKYPLADFNITPDIAIVDPDLAETMPQKLTAHTGMDAMTHAVEAYVSTLHCDYTDPLALHAIKMIHNDLIDSFNGDKEARARMHNAQCLAGMAFSNALLGIVHSMAHKTGAAYSGGHIVHGCANAMYLPKVIKFNSKAPEAAKRYAEIARFIGLQGGDENELVDALITEIRYMNKKLDIPTCIKEYEGGIIDEAEFNEKLVSVAELAVGDACTGSNPRPITPAEMEKLLTCCYYDKEVDF

SEQ ID NO: 396 - protein, 388 aa, Clostridium ljungdahlii
MERFTLPRDIYFGEDALGALKTLKGKKAVVVVGGGSMKRFGFLDKVEEYLKEANIEVKLIEGVEPDPSVETVMKGAKIMTEFGPDWIVAIGGGSPIDAAKAMWLFYEYPDFTFKQAIVPFGLPELRQKAKFVAIASTSGTATEVTSFSVITDYKAKIKYPLADFNLTPDIAIVDPALAQTMPPKLTAHTGMDALTHALEAYVASARSDISDPLAIHSIIMTRDNLLKSYKGDKDARNKMHISQCLAGMAFSNALLGITHSLAHKTGAVWHIPHGCANAIYLPYVLDFNKKACSDRYANIAKILGLKGTTEDELVDSLVKMVQDMDKELNIPLTLKDYGISKDDFNSNVDFIAKNALLDACTGANPRPIDFDQMKKILQCIYDGKKVTF

SEQ ID NO: 397 - protein, 388 aa, Clostridium butyricum
MARFTLPRDLYHGEGALEALKTLKGKKAFVVVGGGSMKRFGFLQKVEDYLKEAGMEVELFEGVEPDPSVETVMKGAEAMRNFEPDWIVAMGGGSPIDAAKAMWIFYEYPDFTFEQAVVPFGLPDLRQKAKFVAIPSTSGTATEVTAFSVITNYTEKIKYPLADFNLTPDVAIVDPALAQTMPAKLVAHTGMDALTHAIEAYTASLRSNFSDPLAIKAIEMVNENLVKSFEGDKVARDLMHEAQCLAGMSFSNALLGIVHSMAHKVGAVFHIPHGCANAIFLPYVIQYNRKSCEDRYADIARALKLEGNTDAELTDSLIKLINEFNDKLSIPHSMKEYGVEEAEFKANLEFISHNAVVDACTGSNPREIDDATMAKLFECTYYGTEVNL

SEQ ID NO: 398 - protein, 388 aa, Clostridium perfringens
MARFTLPRDIYHGKDSLKVLKSLEGKKAFIVIGGGSMKRFGFLDKVLSYLKEANMETKVFEGVEPDPSVETVMKGAKEMEEFNPDWIVSIGGGSPIDAAKAMWIFYEYPDFTFEKAIVPFGLPKLRRKAKFVAIPSTSGTATEVTAFSVITDYKAKIKYPLADFEITPDIAIVDPSLAETMPEKLVAHTGMDALTHAIEAYTASLRSNFTDPLALKAIEMVNMHLVNSYKGDMEARGEMHEAQCLAGMAFSNALLGIVHSMAHKVGAVFHIPHGCANAIFLPYVIKYNRKACEDRYANIARHIGLKGESERELTDALIDLINKFNKELNIPSSMKEYGIEEDDFKANLKFIAHNAVLDPCTGSNPREIDDETMEKLYTCAYYGSDVDF

SEQ ID NO: 399 - protein, 388 aa, Clostridium perfringens
MARFTLPRDIYHGKDSLEVLKSLEGKKAFIVIGGGSMKRFGFLDKVLSYLKEANMETKVFEGVEPDPSVETVMKGAKEMEEFNPDWIVSIGGGSPIDAAKAMWIFYEYPDFTFEKAIIPFGLPKLRRKAKFVAIPSTSGTATEVTAFSVITDYKAKIKYPLADFEITPDIAIVDPSLAETMPEKLVAHTGMDALTHAIEAYTASLRSNFTDPLALKAIEMVNMHLVNSYKGDMEARGEMHEAQCLAGMAFSNALLGIVHSMAHKVGAVFHIPHGCANAIFLPYVIKYNRKACENRYANIARHIGLKGESERELTDDLIDLINKFNKELNIPSSMKEYGIDENEFKANLKFIAHNAVLDPCTGSNPREINDETMEKLYTCAYYGSDVDF

SEQ ID NO: 400 - protein, 388 aa, Clostridium beijerinckii; identical to SEQ ID NO: 219

SEQ ID NO: 401 - protein, 388 aa, Clostridium saccharoperbutylacetonicum
MMRFTLPRDIYYGKGSLEQLKTLKGKKAVLVLGGGSMKKFGFVDKALEYLKEAGIEVKLIEGVEPDPSVETVFKGAETMREFGPDWIISMGGGSPIDAAKAMWIFYEYPDFTFEKAVVPFGLPELRQKAKFIAIPSTSGTATEVTAFSVITDYKTEIKYPLADFNITPDIAIVDSELAETMPATLTAHTGMDALTHAIEAYVATLHSPFTDPLALQAIEMIRDFLLKSYEGDKDAREQMHYSQCLAGMAFSNALLGITHSMAHKTGAVFHIPHGCANAIYLPYVIDFNKKTALDRYAYIAKRLGLSGTTDDELVDSLTNLIKEFNKKMSIPLTLKEYGIDEEVFKAKVDMISERAIADACTGSNPRQLNKDEMKKIFECIYYGNKVDF

SEQ ID NO: 402 - protein, 393 aa, Bacteroides capillosus; identical to SEQ ID NO: 220

SEQ ID NO: 403 - protein, 446 aa, Ruminococcus lactaris
MQKEVLCKVTIRQLCFTWNLYKISKNRVAFLRAERYNIPVKKITILHKKERFVMSRFCLPRDIYHGKGCLEELKNLKGKKACLVVGGGSMKRQGFLDRAVNYLKEGGMEVKLIEGVEPDPSVETVMKGAEVMREFEPDWIVAMGGGSPIDAAKAMWVFYEYPEVSFEDIITPFSFPELRQKAKFAAIPSTSGTATEVTAFSVITNYQTGVKYPLADFNITPDVAIVDPDLVSGLPVKQVAYTGMDALTHAIEAYVSTLNGPFTDPLALQAIEMVLDYLPASYNCDMVAREQMHYAQCLAGMAFSNALLGIVHSMAHKTGAAFSTGHIPHGCANAIYLPYVIQYNAKDPVAAKRYAEIARRMGLPGTSEKALINSLIEKIDDFNVRLNIPKTLKDFGINEDEFKEKVDKIAELAVGDACTGSNPRAIDPAAMAKLLTCTYYGTEVDF

SEQ ID NO: 404 - protein, 395 aa, Clostridium clostridioforme
MRFTLPRDLYHGKDALEALKTLTGKKAIVVVGGGSMKRFGFLDKVVDYLKEAGMEVKLFEGVEPDPSVDTVLKGAAAMQEFEPDWIVAVGGGSPIDAAKAMWAFYEYPDTSFEDLITPFSFPTLRTKAKFCAISSTSGTATEVTAFSVITDYKKGIKYPLADFNITPDVAIVDPALAETMPGKLTAHTGMDAMTHAIEAYVSTLHCEYTDPLALHAIEMINEYLIPSYNGDMEARDKMHDAQCLAGMAFSNALLGIVHSMAHKTGAAYSGGHIVHGCANAMYLPKVIKFNSKEPEAAARYAKIAKFISLPGTTEEELTDALIARLLEMNKALDIPACIKDYEGGIIDEKEFMDKLPKVAELAVGDACTGSNPRSITPRVMEQLLKCCYYDEEVDF

SEQ ID NO: 405 - protein, 393 aa, Clostridium nexile
MSRFCLPRDIYHGKGCLEELKNLKGKKAILVVGGGSMKRQGFLDKAVNYLKEAGMEVQLFEGVEPDPSVETVMKGAEAMRAFEPDWIVAMGGGSPIDAAKAMWAFYEYPDVTFEDLCIPFNFPELRQKAKFAAIPSTSGTATEVTAFSVITDYAKGIKYPLADFNITPDVAIVDSELVEGLPAHQVAYTGMDALTHAIEAYVSTLNCAYTDPLAIQAIEMVFDYLPASYKGNMDARAHMHDAQCLAGMAFSNALLGIVHSMAHKTGAAFSTGHITHGLANAMYLPYVIKYNAKDPVAAKRYAEIARRVGLEGASEKALINSLCKKIDDFNVILGIPATLKEFGIKEDEFKEKIASIAELAVGDACTGSNPRAIDPATMERLFTCVYYGTEVDF

SEQ ID NO: 406 - protein, 389 aa, Clostridium tetani; identical to SEQ ID NO: 211

SEQ ID NO: 407 - protein, 388 aa, Clostridium sporogenes
MERFTLPRDLYFGEGSLETLKTLKGKKAVVVVGGGSMKRFGFLDKVESYLNEAGIEVKLIEGVEPDPSVETVMNGAAVMREFEPDLIVSIGGGSPIDAAKAMWIFYEYPDFTFEQAVVPFGIPELRQKARFVAIPSTSGTATEVTAFSVITDYKKKIKYPLADFNLTPDIAIVDPDLAQTMPAKLTAHTGMDALTHAIEAYVAGLRSVFSDPLAMKAIVMVKEYLVKSYNGDKEARGQMHLAQCLAGMAFSNALLGITHSMAHKTGAVFHIPHGCANAIFLPYVIQYNAKSCGERYATIAKNLGLAGENQDELVKALIEMIREMNKTMNIPLNLKEYGITEEEFKENVKYISHNSVLDACTGSNPREIDDETMEKLFACTYYGQDVEF

SEQ ID NO: 408 - protein, 388 aa, Clostridium beijerinckii
MARFTLPRDLYHGEGALEVLKTLKGKKAFVVVGGGSMKRFGFLKQVEDYLTEAGMEVELFEGVEPDPSVETVMKGAEAMRNFEPDWIVAMGGGSPIDAAKAMWIFYEYPDFTFEQAVVPFGLPELRQKAKFVAIPSTSGTATEVTAFSVITNYTEKIKYPLADFNITPDIAIVDPVLAQTMPKTLTAHTGMDALTHAIEAYTASLRSNFSDPLAIKALQMVQENLIKSFEGDKEARNLMHEAQCLAGMAFSNALLGIVHSMAHKVGAVFHIPHGCANAIFLPYVIQYNRTKCEDRYADIARALKLEGNTDSELTDSLIGMINKMNSDLNIPHSMKEYGVTEEDFKANLSFIAHNAVLDACTGSNPREIDDATMEKLFECTYYGTKVEL

SEQ ID NO: 409 - protein, 388 aa, Clostridium botulinum
MARFTLPRDLYHGEGSLETLKTLKGKKAFVVVGGGSMKRFGFLQKVEDYLKEAGMEVQLFEGVEPDPSVETVMKGAEAMRNFEPDWIVAMGGGSPIDAAKAMWIFYEYPDFTFEQAVVPFGLPDLRQKAKFVAIPSTSGTATEVTAFSVITDYKAKIKYPLADFNITPDIAIVDPELAQTMPAKLVAHTGMDALTHAIEAYTASLRSNFSDPLAIKAIEMVNENLVKSFEGDKEARNLMHEAQCLAGMAFSNALLGIVHSMAHKVGAVFHIPHGCANAIFLPYVIEYNRAECEDRYADIARALKLEGNTDAELTDSLIKLINDFNDKLNIPHSMKEYGVEEADFKANVEFIAHNAVLDACTGSSPRAIDYKTMEKLLGCTFYGTKVNF

SEQ ID NO: 410 - protein, 388 aa, Clostridium botulinum
MERFTLPRDLYFGEGSLEALKTLKGKKAVVVVGGGSMKRFGFLDKVQSYLNEAGIEVKLIEGVEPDPSVETVMNGAAVMREFEPDLIVSIGGGSPIDAAKAMWIFYEYPDFTFEQAVVPFGIPELRQKARFVAIPSTSGTATEVTAFSVITDYKKKIKYPLADFNLTPDIAIVDPDLAQTMPAKLTAHTGMDALTHAIEAYVAGLRSVFSDPLAMQAIVMVKEYLVKSYNGNKEARGQMHLAQCLAGMAFSNALLGITHSMAHKTGAVFHIPHGCANAIFLPYVIQYNFKSCGERYATIAKKLGLAGENQDELVKSLIEMIREMNKTMNIPLNLKEYGITEEDFKENVKYISHNAVLDACTGSNPREINDETMEKLFACTYYGEDVTF

SEQ ID NO: 411 - protein, 393 aa, Clostridiales sp.
  Butyrate-producing bacterium SS3/4
MARFTLPRDIYHGKGCLEELKNLKGKKAFLVVGGGSMKRQGFLDKAVHYLKDGGMEVEVFEGVEPDPSVETVMRGAEAMRKFEPDWIVSMGGGSPIDAAKAMWAFYEYPETTFEDLITPFSFPELRQKARFAAIPSTSGTATEVTAFSVITNYQTGVKYPLADFNITPDVAIVDPDLVMGLPVKQVAYTGMDALTHAIEAYVSTLNGPFTDPLALQAIEMVLEYLPASYNGNTHAREEMHYAQCLAGMAFSNALLGIVHSMAHKTGAAFSTGHIPHGCANAIYLPYVIQYNAKDTVAAERYAEIARRMGLEGRSRQALINSLCAKINEFNEKLNIPKTLKEFGINEDEFKEKVDRIAELAVGDACTGSNPREIDPANMAKLLTCTYYGTEVDF

SEQ ID NO: 412 - protein, 391 aa, Anaerostipes caccae; identical to SEQ ID NO: 213

SEQ ID NO: 413 - protein, 427 aa, Clostridium sp.
MKASAQTEACLQWGMRMSGDGPAGRVHPFMKEESEMARFTLPRDIYHGKGCLEELKNLKGKRAILVVGGGSMKRQGFLDKAVEYLKEAGMEVRVFEGVEPDPSVETVMKGAQVMREFEPDWIVSMGGGSPIDAAKAMWAFYEYPEVTFEELCTPFNFPELRTKAKFAAIPSTSGTATEVTAFSVITDYEKGIKYPLADFNITPDVAIVDPELVEGLPAKQVAYTGMDALTHAIEAYVSTLHCTFTDPLAIKAIQIVNSDLQKSYDGDMRSREEMHYGQCLAGMAFSNALLGIVHSMAHKTGAAFSTGHITHGLANAMYLPYVISYNAKEPEAAARYAEIANAIGITGTVEECIEGLRKKIRSMNDYMGIPNTLKEFGIEEKEFKEKLAAISENAVGDACTGSNPRTIDPKTMEKLFTCIYYGTEVDF

SEQ ID NO: 414 - protein, 411 aa, Clostridium sp.
  [Clostridium] cf. saccharolyticum K10
MSGDGPAGRVHPFMKEESEMARFTLPRDIYHGKGCLEELKNLKGKRAILVVGGGSMKRQGFLDKAVEYLKEAGMEVRVFEGVEPDPSVETVMKGAQVMREFEPDWIVSMGGGSPIDAAKAMWAFYEYPEVTFEELCTPFNFPELRTKAKFAAIPSTSGTATEVTAFSVITDYEKGIKYPLADFNITPDVAIVDPELVEGLPAKQVSYTGMDALTHAIEAYVSTLHCTFTDPLAIKAIQIVNSDLQKSYDGDMRSREEMHYGQCLAGMAFSNALLGIVHSMAHKTGAAFSTGHITHGLANAMYLPYVISYNAKEPEAAARYAEIANAIGITGTVEECIEGLRKKIRSMNDYMGIPNTLKEFGIEEKEFKEKLAAISENAVGDACTGSNPRTIDPKTMEKLFTCIYYGTEVDF

SEQ ID NO: 415 - protein, 438 aa, Clostridium asparagiforme
MYLPTIARPWYDVIVKEITKVTDLERTGDVTANKFCAEKERLTMRFTLPRDLYHGKDALEALKTLTGKKAIVVVGGGSMKRFGFLDKVVDYLKEAGMEVQLFEGVEPDPSVDTVMKGAEAMRQFGPDWIVAIGGGSPIDAAKAMWAFYEYPETTFEDLITPFSFPTLRTKAKFCAIPSTSGTATEVTAFSVITDYNKGIKYPLADFNITPDIAIVDPALAETMPKKLTAYTGMDAMTHAIEAYVSTLHCEYTDPLALHAIEMINEYLIPSYNGDMEARDKMHDAQCLAGMAFSNALLGIVHSMAHKTGAAYSGGHIVHGCANAMYLPKVIKFNAKEPEAAARYAKIARFIGLTGATDEELTTALIGRLLEMNKALEIPTCIKDYEGGIIDEKEFMDKLPKVAELAVGDACTGSNPRTINPDQMAKLLKCCFYDEEVDF

SEQ ID NO: 416 - protein, 388 aa, Clostridium beijerinckii
MARFTLPRDIYHGEGALEALKTLKGKKAFLVVGGGSMKRFGFLKQVEDYLKEAGMEVELFEGVEPDPSVETVMKGAEAMRNFEPDWIVAMGGGSPIDAAKAMWIFYEYPDFTFEQAVVPFGLPDLRQKAKFVAIPSTSGTATEVTAFSVITNYSEKIKYPLADFNITPDIAIVDPALAQTMPKTLTAHTGMDALTHAIEAYTASLQSNFSDPLAIKAVEMVQENLIKSFEGDKEARNLMHEAQCLAGMAFSNALLGIVHSMAHKVGAVFHIPHGCANAIFLPYVIEYNRTKCENRYGDIARALKLKGNNDAELTDSLIELINGLNDKLEIPHSMKAYGVTEEDFKANLSFIAHNAVLDACTGSNPREIDDATMEKLFECTYYGTKVNL

SEQ ID NO: 417 - protein, 393 aa, Clostridium sp.
MSRFTLPRDIYHGKGCLEELKNLKGKKAILVVGGGSMKRQGFLDRAVDYLKEAGMEVQLFEGVEPDPSVETVMKGAEAMRAFEPDWIVAMGGGSPIDAAKAMWAFYEYPEVTFEDLCIPFNFPELRQKAKFAAIPSTSGTATEVTAFSVITNYQTGVKYPLADFNITPDVAIVDSELVEGLPAKQVAYTGMDALTHAIEAYVSTLNCAFTDPLAIQAIEMVFDYLPASYRGNMDARAEMHTAQCLAGMAFSNALLGIVHSMAHKTGAAFSTGHITHGCANAMYLPFVIKYNAKDPVAAKRYAEIARRVGLQGASEKALINSLCEKIDDFNVQLGIPKTLKEFGINEDEFKEKIARISELAVGDACTGSNPRSITPAEMERLFNCIYYGTEVDF

SEQ ID NO: 418 - protein, 405 aa, Butyrivibrio proteoclasticus; identical to SEQ ID NO: 212

SEQ ID NO: 419 - protein, 396 aa, Clostridium hathewayi
MARFTLPRDLYHGKGALEELKNLKGNKAIVVVGGGSMKRFGFLDRVIDYLKEAGLEVKLFEGVEPDPSVDTVMKGAEMMREFGPDWIVAIGGGSPIDAAKAMWAFYEYPDTTFEDLCIPFNFPTLRTKARFCAIPSTSGTATEVTAFSVITDYNKGIKYPLADFNITPDVAIVDPDLAETMPAKLTAFTGMDAMTHAIEAYVSTLHCDYTDPLALHAIKMIHNDLIDSYNGDMAARDRMHNAQCLAGMAFSNALLGIVHSMAHKTGAAYSGGHIVHGCANAMYLPKVIRFNAKEPEAAKRYAEIARFIDLKGSTDEELVAALIAELRGMNEKLNIPTCIKEYEGGIIDETEFNEKLPSVAELAVGDACTGSNPRPITPAEMEKLLTCCYYDKEVDF

SEQ ID NO: 420 - protein, 393 aa, Dorea formicigenerans
MARFTLPRDIYHGEGALEELKNLKGKKAIVVVGGGAMKRQGFLAKVEDYLKEAGMKVALFEGVEPDPSVETVMKGAKAMQEFEPDWIVAMGGGSPIDAAKAMWAFYEYPEITFEDLITPFSFPELRQKAKFAAIPSTSGTATEVTAFSVITDYAKGIKYPLADFNITPDVAIVDPALVAELPVNQVAYTGMDALTHAIEAYVSTLNCPYTDPLALKAIEMVFDYLPASYRCNMEARAKMHDAQCLAGMAFSNALLGIVHSMAHKTGAAFSTGHITHGLANAMYLPYVIKYNAKDPVAAKRYAEIARFVGLGGASEKALINSLCEKINEFNVILNIPATLKDFGIKEDEFKEKIATISENAVGDACTGSNPRTIDPATMERLFTCIYYGTEVDF

SEQ ID NO: 421 - protein, 388 aa, Clostridium sp.
MARFTLPRDLYHGEGSLEALKTLKGKKAFVVVGGGSMKRFGFLDKVETYLKEAGMEVELFEGVEPDPSVETVMSGAEAMRKFEPDWIVAMGGGSPIDAAKAMWIFYEYPDFTFEQAVIPFGLPELRQKAKFVAIPSTSGTATEVTAFSVITDYKAKIKYPLADFNITPDIAIVDPDLAQTMPAKLVAHTGMDALTHAIEAYTASLRSNFSDPLAMKAIEMVRENLVASYNGDKQARNLMHEAQCLAGMAFSNALLGIVHSMAHKTGAVFHIPHGCANAIFLPYVIQYNRTKCEERYADIARALKLKGETDAELTDSLIEMINDLNTELNIPHTVKEYGVTEEDFKANLEFISHNAVLDACTGSNPREIDDATMEKLFECTYYGTKVNF

SEQ ID NO: 422 - protein, 404 aa, Synergistes sp.
MARFTLPRDLYHGKGSLEALKTLKGTKAIVVVGGGSMKRFGFLDRVEQYLKEAGMEVRLFEGVEPDPSVETVMRGAAVMREFQPDWIVSIGGGSPIDAAKAMWAFYEYPDTTFEALCIPFNFPTLRQKAKFCAIPSTSGTATEVTAFSVITDYAKGIKYPLADFNITPDVAIVDPELAETMPKKLTAHTGMDAMTHAIEAYVSTLNCDYTDPLALHAIEMVSENLVKSYNGDMAARDRMHDAQCLAGMAFSNALLGIVHSMAHKTGAAYSGGHIVHGCANAMYLPKVIRFNAAEPAAAERYAKIAKYLHLEGKTTAELVEALVDHINGLNAQLDIPTRIKDYEGGIIDEKEFMEKLPKVAELAVGDACTGSNPRAITPKQMEELLKSCYFDKEAVRAAKSTQAA

SEQ ID NO: 423 - protein, 388 aa, Clostridium butyricum
MARFTLPRDLYHGEGALEALKTLKGKKAFVVVGGGSMKRFGFLQKVEDYLKEAGMEVELFEGVEPDPSVETVMKGAEAMRNFEPDWIVAMGGGSPIDAAKAMWIFYEYPDFTFEQAVVPFGLPDLRQKAKFVAIPSTSGTATEVTAFSVITNYTEKIKYPLADFNLTPDVAIVDPALAQTMPAKLVAHTGMDALTHAIEAYTASLRSNFSDPLAIKAIEMVNENLVKSYKGDKVARDLMHEAQCLAGMSFSNALLGIVHSMAHKVGAVFHIPHGCANAIFLPYVIQYNRKSCEDRYADIARALKLEGNTDAELTDSLIKLINEFNDKLSIPHSMKEYGIEEAEFKANLEFIAHNAVLDACTGSNPREIDDATMAKLFECTYYGTEVNL

SEQ ID NO: 424 - protein, 393 aa, Lachnospiraceae bacterium
MARFTLPRDIYHGKGCLEELKNLKGKKAILVVGGGSMKRQGFLDKAVNYLKEAGMEVQLFEGVEPDPSVETVMKGAEAMRAFGPDWIVAMGGGSPIDAAKAMWAFYEYPDVTFEDLCIPFNFPELRQKAKFAAIPSTSGTATEVTAFSVITDYAKGIKYPLADFNITPDVAIVDSELVEALPARQVAYTGMDALTHAIEAYVSTLNCAYTDPLAIQAIEMVFDYLPASFKGNMEARAQMHNAQCLAGMAFSNALLGIVHSMAHKTGAAFSTGHITHGLANAMYLPYVIKYNAKDPVAAKRYAEIARRVGLAGASERALINSLCEKINEFNVILGIPATLKEFGIKEDEFKEKISEIAKNAVGDACTGSNPRAIDPETMERLFTCIYYGTEVDF

SEQ ID NO: 425 - protein, 388 aa, Clostridium butyricum; identical to SEQ ID NO: 217

SEQ ID NO: 426 - protein, 388 aa, Clostridium saccharobutylicum
MMRFTLPRDIYYGKGSLEQLKNLKGKKAMLVLGGGSMKRFGFVDKALGYLKEAGIEVKLIEGVEPDPSVETVFKGAELMRQFEPDWIIAMGGGSPIDAAKAMWIFYEHPEKTFDDIKDPFTVPELRNKAKFLAIPSTSGTATEVTAFSVITDYKTEIKYPLADFNITPDVAVVDSELAETMPPKLTAHTGMDALTHAIEAYVATLHSPFSDPLAMQAVEMINEYLLKSYEGDKEAREQMHYAQCLAGMAFSNALLGICHSMAHKTGAVFHIPHGCANAIYLPHVIKFNSKTSLERYAKIAKQISLPGNTNEELVDSLINLVKELNKKMQIPATLKEYGIDEQEFKDKVDLISERAIGDACTGSNPRQLNKDEMKKIFECVYYGTEVDF

SEQ ID NO: 427 - protein, 388 aa, Clostridium perfringens
MARFTLPRDIYHGKDSLEVLKSLEGKKAFIVIGGGSMKRFGFLDKVLSYLKEANMETKVFEGVEPDPSVETVMKGAKEMEEFNPDWIVSIGGGSPIDAAKAMWIFYEYPDFTFEKAIVPFGLPKLRRKAKFVAIPSTSGTATEVTAFSVITDYKAKIKYPLADFEITPDIAIVDPSLAETMPEKLVAHTGMDALTHAIEAYTASLRSNFTDPLALKAIEMVNMHLVNSYKGDMEARGEMHEAQCLAGMAFSNALLGIVHSMAHKVGAVFHIPHGCANAIFLPYVIKYNRKACENRYANIARHIGLKGESERELTDDLIDLINKFNKELNIPSSMKEYGIDENEFKANLKFIAHNAVLDPCTGSNPREINDETMEKLYTCAYYGSDVDF

SEQ ID NO: 428 - protein, 388 aa, Clostridium botulinum
MARFTLPRDIYFGSGCLDVLKTIKGKKAVIVIGGGSIKRSGFLDKIEGYLKEANIETKLIEGVEPDPSVETVMNGAAIMREFQPDLIIGVGGGSPIDAAKAMWIFYEYPDFTFEKAVIPFGIPELRQKAKFIAIPSTSGTASEVTAFSVITDYKAKIKYPLADFNLTPDIAIVDSDIAQTMPPKLTAHTGMDALTHAIEAYVAGARSAFSDPLAIQAIVMVRDNLVNSFKGDKEARDQMHIAQCLAGMSFSNALLGITHSMAHKIGAVFHIPHGCANAIFLPYVIEYNRKACEDRYATIARRLNLEGNNDSELVDSLINLINELNVKLNIPSTIKEWGVSEEEFKENVEFMAHNAVLDACTGANPRNIDDKTMMKLYSCAFYGEKVNF

SEQ ID NO: 429 - protein, 396 aa, Clostridium lentocellum
MARFTLPRDLYHGKGSINELKNLTGKKAIVVVGGGSMKRFGFLDQVVDNLKEAGMEVKLFENVEPDPSVETVMKGAEVMREFEPDWIVAIGGGSPIDAAKAMWVFYEYPETTFEAIIQPFSFPTLRQKAKFCAIPSTSGTATEVTAFSVITDYAKGIKYPLADFNITPDIAIVDPNLAETMPAQLTAHTGMDALTHAIEAYVSTCHSCFTDPLALKAIEMIFDDLQASYEGDMEAREQMHYAQCLAGMAFSNALLGIVHSMAHKTGAAYKNGHIVHGCANAMYLPQVIRFNAKDEVAAKRYADIAKFIDLEGDTTEGLVKALCDKIEAYNVALNIPKCIKDYENGMVPEDEFLEKLPEVAALAISDACTGSNPRIPDQKQMEELLKCCYYGTEVDF

SEQ ID NO: 430 - protein, 388 aa, Clostridium botulinum
MARFTLPRDIYFGAGCLDVLKTIKGKRAVIVIGGGSIKRSGFLDKIEGYLKEANIETRLIEGVEPDPSVETVMNGAKVMREFNPDLIIGIGGGSPIDAAKAMWIFYEYPEFTFEKAVVPFGLPDLRQKAKFIAIPSTSGTASEVTAFSVITDYKAKIKYPLADFNLTPDIAIVDSDIAQTMPPKLVAHTGMDALTHAIEAYVAGLRSAISDPLAIQAIVMVRDNLVKSFEGDKKARDEMHIAQCLAGMAFSNALLGITHSMAHKIGAVFHIPHGCANAIFLPYVIDYNRKVCEDRYATIARSLGLKGNTDKELVDSLIGLINELNVKLNIPSTIKEWGVSEEDFKSNVEFMAHNAVLDACTGANPREINDETMVKLYNCTFYGEKVNF

SEQ ID NO: 431 - protein, 388 aa, Clostridium perfringens
MARFTLPRDIYHGKDSLEVLKSLEGKKAFIVIGGGSMKRFGFLDKVLSYLKEANMETKVFEGVEPDPSVETVMKGAKEMEEFNPDWIVSIGGGSPIDAAKAMWIFYEYPDFTFEKAIIPFGLPKLRRKAKFVAIPSTSGTATEVTAFSVITDYKAKIKYPLADFEITPDIAIVDPSLAETMPEKLVAHTGMDALTHAIEAYTASLRSNFTDPLALKAIEMVKMHLVNSYKGDMEARGEMHEAQCLAGMAFSNALLGIVHSMAHKVGAVFHIPHGCANAIFLPYVIKYNRKACENRYANIARHIGLKGESERELTDALIDLINKFNKELNIPSSMKAYGIEEDDFKANLKFIAHNAVLDPCTGSNPREIDDETMEKLYTCAYYGSDVDF

SEQ ID NO: 432 - protein, 428 aa, Clostridium sp.
MMYNVFVAKQSIEIGYSNVGYIRKGSISVIQVKEMLVMARFTLPRDLYFGENALETLKTIKGNKAVLCLGGGSMKRFGFVDKVVEYLKEAGIETKLIEGIEPDPSVETVMKGAKVMQEFEPDLIIAMGGGSPIDAAKAMWVFYEHPETTFDDIKDPFTIPPLRNKATFIAIPSTSGTATEVTAFSVITDYSTGIKYPLADFEITPDVAIVDPSLAETMPQTLTAHTGMDALTHAIEAYVAGLHSPFSDPLAIHAIEMIFDNLKASYEGDMQARGNMHIAQCLAGMAFSNALLGIVHSLAHKTGAVFNTGHIPHGCANAIYLPYVIQYNAKVCEDRFAMIARKLGLPGVTDKALTLSLIKAVEDLRTSLHIVSNLKDFGVNEDEFLEKKHMIAERAVGDACTGSNPRETSVEDMEKILECIYYGKDVTF

SEQ ID NO: 433 - protein, 388 aa, Clostridium sp.
MMRFTLPRDVYYGKGSLEQLKNLKGKKAVLVLGGGSMKKFGFVDKAVSYLNEAGIEVKLIEGVEPDPSVETVFKGAEVMREFNPDWIISMGGGSPIDAAKAMWIFYEYPDFTFEQAVVPFGLPELRQKAKFLAIPSTSGTATEVTAFSVITDYKTEIKYPLADFNITPDIAIVDSELAETMPPTLTAHTGMDALTHAIEAYVATLHSPFTDPLAIQAIEMINEYLAKSYEGDNEAREQMHYAQCLAGMAFSNALLGITHSMAHKTGAVFHIPHGCANAIYLPYVIDFNKKAASDRYAKIAKSLGLDGQTNDELIDSLTSLIQEFNKKMSIPLTLKEYGIDEEEFKAKVDLIAERAVGDACTGSNPRQINKDEMKKIFECVYYGNKVDF

SEQ ID NO: 434 - protein, 393 aa, Lachnospiraceae bacterium
MGRFTLPRDIYHGKGCLEELKNLKGKKAILVVGGGSMKRQGFLDKAVNYLKEAGMEVELFEGVEPDPSVETVMRGAEAMRKFEPDWIISMGGGSPIDAAKAMWAFYEYPDVTFEELCIPFNFPELRQKAKFCAIPSTSGTATEVTAFSVITNYETGVKYPLADFNITPDVAIVDSELVEGLPAKQVAYTGMDALTHAIEAYVSTLNCAYTDPLAIQAIEMVFDYLPASFRGNMDARAHMHDAQCLAGMAFSNALLGIVHSMAHKTGAAFSTGHITHGCANAMYLPYVIKYNAKDPVAAKRYAEIARKVGLPGASEKALINSLCEKIDDFNVQLNIPKTLKEFGINEDEFKEKIAKISELAVGDACTGSNPRAIEPATMEKLFTCIYYGTEVDF

SEQ ID NO: 435 - protein, 388 aa, Clostridium botulinum
MARFTLPRDIYFGAGCLDVLKTIKGKKAVIVIGGGSIKRSGFLDKIERYLKEANIETRLIEGVEPDPSVETVMNGASVMREFEPDLIIGVGGGSPIDAAKAMWIFYEYPDFTFEKAVIPFGIPELRQKAKFIAIPSTSGTASEVTAFSVITDYKAKIKYPLADFNLTPDIAIVDSDIAQTMPPKLTAHTGMDALTHAIEAYVAGARSAFSDPLAIQAIVMVRDNLVNSFKGDREARDQMHIAQCLAGMSFSNALLGITHSMAHKIGAVFHIPHGCANAIFLPYVIEYNRKACEDRYATIARRLELKGNTDSELVDSLINLINELNVKLNIPSTIKEWGVSEEDFKKNVEFMAHNAVLDACTGANPREIDDETMTKLYNCTFYGEKVDF

SEQ ID NO: 436 - protein, 395 aa, Clostridium clostridioforme
MRFTLPRDLYHGKDALEALKTLAGKKAIVVVGGGSMKRFGFLDKVIDYLKEAGMEVQLFEGVEPDPSVDTVLKGAAAMQEFEPDWIVAVGGGSPIDAAKAMWAFYEYPDTSFEDLITPFSFPTLRTKAKFCAISSTSGTATEVTAFSVITDYKKGIKYPLADFNITPDVAIVDPALAETMPKKLTAHTGMDAMTHAIEAYVSTLHCEYTDPLALHAIEMINEYLIPSYNGDMEARDKMHDAQCLAGMAFSNALLGIVHSMAHKTGAAYSGGHIVHGCANAMYLPKVIKFNSKEPEAAARYAKIAKFINLPGTTDEELTDALIARLLEMNKALDIPACIKDYEGGIIDEKEFMDKLPKVAELAVGDACTGSNPRTITPEVMEQLLKCCYYDEEVDF

SEQ ID NO: 437 - protein, 393 aa, Dorea longicatena
MARFTLPRDVYHGKGCLSELKNLKGKKAVLVVGGGSMKRQGFLDKAVNYLKEGGMEVKLIEGVEPDPSVETVMKGAKVMQEFEPDWIVAMGGGSPIDAAKAMWVFYEYPDETFENIITPFSFPELRQKAKFAAIPSTSGTATEVTAFSVITDYNTGIKYPLADFNITPDVAIVDPELVEGLPQKQVAYTGMDALTHAIEAYVSTLNCPFTDPLALQAIEMVLDYLPASYNLNMEAREQMHYAQCLAGMAFSNALLGIVHSMAHKTGAAFSTGHIPHGCANAIYLPYVIKYNAKDKVAASRYAEIARRMGLPGTSEKALINSLCAKIDEFNAKMNIPKTLKEFGINEEEFKEKLDKIAELAVGDACTGSNPRAIDPATMAKLFTCTYYGTEVDF

SEQ ID NO: 438 - protein, 391 aa, Anaerostipes sp.
MGRFTLPRDLYFGKGSLETLKTLDGKKAVLVLGGGSMKRFGFVDQVVDYLKEAGIETKLIEGVEPDPSVETVFKGAEVMRDFEPDWIIAMGGGSPIDAAKAMWIFYEHPETTFDDVKDPFTVPPLRNKAKFLAIPSTSGTATEVTAFAVITDYSSGIKYPLADFEITPDIAIVDPALAETMPPKLTSYTGMDALTHAIEAYVAGLHSPFSDPLALEAIEMVFDNLKASYEGDMTARENMHYAQCLAGMSFSNALLGIVHSLAHKTGAVFDTGHITHGCANAIYLPYVIQFNAKVCEERYAAIARRIGLPGNSDKALTLSLIEAIREMNKKLNIVSNLKDFGINEEEFNQKKRMIAERAVADACTGSNPRETSVDDMEKVLECIYYGKDVTF

SEQ ID NO: 439 - protein, 468 aa, Clostridium saccharoperbutylacetonicum; identical to SEQ ID NO: 237

SEQ ID NO: 440 - protein, 468 aa, Clostridium saccharoperbutylacetonicum
MIKDTLVSITKDLKLKTNVENANLKNYKDDSSCFGVFENVENAISNAVHAQKILSLHYTKEQREKIITEIRKAALENKEILATMILEETHMGRYEDKILKHELVAKYTPGTEDLTTTAWSGDNGLTVVEMSPYGVIGAITPSTNPTETVICNSIGMIAAGNTVVFNGHPGAKKCVAFAVEMINKAIISCGGPENLVTTIKNPTMDSLDAIIKHPSIKLLCGTGGPGMVKTLLNSGKKAIGAGAGNPPVIVDDTADIEKAGKSIIEGCSFDNNLPCIAEKEVFVFENVADDLISNMLKNNAVIINEDQVSKLIDLVLQKNNETQEYSINKKWVGKDAKLFLDEIDVESPSSVKCIICEVSARHPFVMTELMMPILPIVRVKDIDEAIEYAKIAEQNRKHSAYIYSKNIDNLNRFEREIDTTIFVKNAKSFAGVGYEAEGFTTFTIAGSTGEGITSARNFTRQRRCVLAG

SEQ ID NO: 441 - protein, 468 aa, Clostridium beijerinckii; identical to SEQ ID NO: 70

SEQ ID NO: 442 - protein, 468 aa, Clostridium beijerinckii; identical to SEQ ID NO: 239

SEQ ID NO: 443 - protein, 468 aa, Clostridium sp.
MNKDTTISETENLKFKTNIKNADLKNYENSTSYSGVFEDVEVAINKAITAQKEFSLYYTKEQREKILTEIRKATLKNKKILAKMILDETHMGRYEDKILKHELVAKYTPGIEDLTTTAWSGDNGLTVVEMAPYGVIGAITPSTNPTETVICNSIGMIAAGNAVVFNGHPSAKKCVAFAVDMINKAIVSCGGPKNLITAVKNPTMESLDAIIKHPEIKLLCGTGGPGMVKTLLNSGKKAIGAGAGNPPVIVDDTADIEKAGKNIIEGCSFDNNLPCIAEKEVFVFDNVADNLIDNMLKNNAVIINKDKITKLLNLILQKNNETQEYNINKKWVGKDAKLFLNEIDVEAPSSVRCIICEVEPDHPFVMTELMMPILPIVRVKNIDDAIQYAKIAEQSRKHSAYIYSKNIDNLNRFEKEIDTTIFVKNAKSFAGVGYNAEGFTTFTIAGCTGEGITSARNFTRQRRCVLAG

SEQ ID NO: 444 - protein, 469 aa, Clostridium saccharobutylicum
MNNNLFVSPETKDLKLRTNVENLKFKGCEGGSTYIGVFENAETAIDEAVNAQKRLSLYYTKEQREKIITEIRKVTLKNKEILAQMILEETHMGRYEDKILKHELVAKYTPGTEDLATTAWSGDNGLTVVEMSPYGVIGAITPSTNPTETIICNSIGMIASGNAVVFNGHPGAKKCVAFAVDMINRAIISCGGPRNLVTAIKNPTMESLDAIIKHPAIKLLCGTGGPGMVKTLLSSGKKSIGAGAGNPPVIVDDTADIEKAGKSIIEGCSFDNNLPCIAEKEVFVFENVADDLIKNMLKNNAVIINKDQVSRLVNLVLQKNNETSEYTINKKWVGKDAKLFLDEIDVESSSDVRCIICEVDADHPFVMTELMMPILPIVRVKDIDEAIKYAKIAEQNRKHSAYIYSKNIENLNRFEKEIDTTIFVKNAKSFAGVGYGAEGFTTFTIAGCTGEGITSARNFTRQRRCVFVG

SEQ ID NO: 445 - protein, 467 aa, Clostridium botulinum; identical to SEQ ID NO: 235

SEQ ID NO: 446 - protein, 527 aa, Caldalkalibacillus thermarum; identical to SEQ ID NO: 240

SEQ ID NO: 447 - protein, 480 aa, Pelosinus fermentans
MSIDQALIEKITLEILTKMQTGAKAAPAGYGDGIFETVDEAVAAARKAYQELKTLSLEKREVLIKAMRDVAYENATILAQMAVDESGMGRVSDKIIKNQVAALKTPGTEDLTTQAWSGDNGLTLIEMGPYGVIGAITPTTNPTETVICNGIGMIAAGNTVFFSPHPTAKNTSMKIITLLNQAIVKAGGPNNLLTSVANPSIKAANEMMKHPGINMLVATGGPGVVKAVLSSGKKAIGAGAGNPPVIVDETADIEKAARDIVAGCSFDNNLPCIAEKEVIAIGSIADRLITYMQKYGAYLISGSNIDRLLDVIMTVQEEKIAEGCTDKPKRSYGINKDYVGKDAKYLLSKIGIDVPDSVRVVLCETPADHPFVIEELMMPVLPVVQVKDIDEAIEVAVRVEHGNRHTAAMHSKNVDHLTRFARAVETTIFVKNAPSYAGIGVGGEGFTSFTLAGPTGEGITSPRSFTRQRRCVLVDAFSIV

SEQ ID NO: 448 - protein, 479 aa, Thermoanaerobacterium thermosaccharolyticum
MEINDNMISEIIERVLKEVQKKSINDRYQNGIYDRMEDAIEAAYEAQKKLMKMSIEQRERLISAMRKAILDNAKSCAKLSVEETGMGRVDHKYLKLKLVAEKTPGTEVLTTKAYSGDKGLTLVEMAPFGVIGSITPSTNPAETVCCNSIGMIAAGNTVVFSPHPGAIKSSLMAVEFLNKAIIEAGGPENLITSVRKPSIEFTDVMINHPKINLLVATGGPAIVKKVLSSGKKAIGAGAGNPPCVVDETADIKKAARDIILGCTFDNNLPCIAEKEVIAVESIYEELIENMKKNGAYEITDDEAEKLADIVLTKKEELKAEGCSINRPKFEYSVNKKWVGKDAKVLLEQIGINVGDDIVCIIYRCDKQHPFVQEELMMPILPIVKVKNIDEAINVAVEVEHGNHHTAEMHSKNIDNLTRFAKAINTTIFVKNAPSYAGIGFGGEGYTTFTIAGPTGEGLTCAATFTRQRRCVMVDSFRIV

SEQ ID NO: 449 - protein, 480 aa, Pelosinus fermentans; identical to SEQ ID NO: 238

SEQ ID NO: 450 - protein, 479 aa, Desulfosporosinus sp.
MSVDQALIRKITSEILAKMQNRTVSACQDCNGIFTTVDEAVAAARIAYQELRTLSLEKREELIKAMRNVALENATMLAEMAVKESGMGRVEDKIIKHKLVAVKTPGTEDLRTEAWSGDSGLTLVEMGPYGVIGAITPTTNPVATIICNGIGMIAAGNAVFFSPHPTAKNTSIKTITLLNEAIVKAGGPMNLLTSVADPSISAANAMMKHAGINLLVATGGPGVVKAVLSSGKKAIGAGAGNPPVIVDETADIEKAARDIIAGCSFDNNLPCIAEKEVIAVGCIADRLISNMQKYGAYLISGSKIDQMLDVVMTATEEKMAEGCTAKPIKRYGINKDFVGKDAKYILTQIGLDVPDTIKVILCETPADHPFVIEELMMPILPVVQVKDIDAAIELAVKVEHGNRHTAMMHSKNVDNMTRFAKAIETTIFVKNAPSYAGIGVGGEGFCTFTIAGPTGEGLTTARSFTRQRRCVLVDSFSII

SEQ ID NO: 451 - protein, 482 aa, Clostridium methylpentosum
MEITPNQIDQIVANVMAQLGGSAAPAASYDSTQYSGRKYIGIYATMTEAIDAVADAYKVLRSMTVDQREKIIEKIREFTRAEAEIMAKMGVEETGMGKVEHKTLKHHLVADKTPGTEDIQTEAMSGDGGLTLLEMAPFGIIGAISPSTNPSETVLCNSMGMIAGANAVVFNPHPSAICTSNYAVDLVNRASLAAGGPANLCCSVVKPTMQSADDMVKDPRVKMLVCTGGPGVVRAMLSSGKKAIGAGAGNPPVIVDDTADIRKAAKDIIDGCTFDNNLPCIAEKEVFAFSNIADELMYYMQQNGAYFISGEMADRLAKIVLVEKKNEKTGKISYSVSRDWVGRDAKKFLAALDIEVGDDVRCVICETDENHLFVQTELMMPILPIVRVNNIDEAVRMAVRAEHGNRHTAHMHSKNIDNLTKFARAVETTIFVKNAPSYAGIGFGSEGHTTFTIAGPTGEGLTSARSFTRKRRCVMSDSFNIV

SEQ ID NO: 452 - protein, 467 aa, Thermoanaerobacterium saccharolyticum
MKVKEEDIEAIVKKVLSEFNFEKNTKSFRDFGVFQDMNDAIRAAKDAQKKLRNMSMESREKIIQNIRKKIMENKKILAEMGVSETGMGKVEHKIIKHELVALKTPGTEDIVTTAWSGDKGLTLVEMGPFGVIGTITPSTNPSETVLCNSIGMIAAGNSVVFNPHPGAVNVSNYAVKLVNEAVMEAGGPENLVASVEKPTLETGNIMFKSPDVSLLVATGGPGVVTSVLSSGKRAIGAGAGNPPVVVDETADIKKAAKDIVDGATFDNNLPCIAEKEVVSVDKITDELIYYMQQNGCYKIEGREIEKLIELVLDHKGGKITLNRKWVGKDAHLILKAIGIDADESVRCIIFEAEKDNPLVVEELMMPILGIVRAKNVDEAIMIATELEHGNRHSAHMHSKNVDNLTKFGKIIDTAIFVKNAPSYAALGYGGEGYCTFTIASRTGEGLTSARTFTKSRRCVLADGLSIR

SEQ ID NO: 453 - protein, 467 aa, Thermoanaerobacterium xylanolyticum
MKVKEEDIEAIVKKVLSEFNLEKTTSKYGDVGIFQDMNDAISAAKDAQKKLRNMPMESREKIIQNIRKKIMENKKILAEMGVRETGMGRVEHKIVKHELVALKTPGTEDITTTAWSGDKGLTLVEMGPFGVIGAITPSTNPSETVLCNSIGMIAAGNSVVFNPHPGAVNVSNYAVKLVNEAAMEAGGPENLVVSVEKPTLETGNVMFKSSDVSLLVATGGPGVVTAVLSSGKRAIGAGAGNPPVVVDETADIKKAAKDIIDGATFDNNLPCIAEKEVVSVDKITDELIYYMQKNGCYKIEGREIEKLIELVLDHEGGKTTLNRKWVGKDAHLILKAIGIDADESVRCIIFEAEKDNPLVVEELMMPILGIVRAKNVDEAIMIATELEHGNRHSAHMHSKNIDNLTKFGKIIDTAIFVKNAPSYAALGYGGEGYCTFTIASRTGEGLTSARTFTKSRRCVLADGLSIR

SEQ ID NO: 454 - protein, 477 aa, Acetonema longum
MVDQTLIEQITRAVLTQMKAGKDAAVSGDGIFATVDQAVAAARQAYQELRLLTLEKRETLIRAIRDAAFANAAVIAQMAVQESGMGRVEDKILKNQLAARKTPGTEDLTSRAWSGDHGLTLVEMAPYGVIGAITPTTNPSETVICNSIGMIAAGNSIVFSPHPTAQNTSLTTIRLLNEAIVKAGGPDNLLTAVAEPSIEAANAMMRHPGIQMLVATGGPAVVKAVLSSGKKAIGAGAGNPPAVVDETADIAKAAKDIVAGCSFDNNLPCIAEKEIIAVGRIADELISYLQKYGAYLISGRDIERLMEVVLTERTEEMAPGCVGKPRRVYGVNKDYIGKDAKFILSKINIQAPDHIRVILCETPADHPFVLEELMMPVLPLVSVRDIDAAIDLAVKVEHGNRHTAVMHSKNVDYMTRLAKAIETTIFVKNAPSYAGIGVGGEGFTTFTIAGPTGEGLTSARSFTRQRRCALVDAFSIV

SEQ ID NO: 455 - protein, 465 aa, Geobacillus thermoglucosidans
MSVDAQKIEKLVRKILEEMEEKKKPAETECEWGIFDHMNQAIEAAEIAQKELVQLSLGQRGKLIEAIRKAAKENAEKFARMAVDETGMGKYEDKIVKNLLAAEKTPGIEDLRTEVFSGDDGLTLVELSPYGVIGAITPTTNPTETIICNSIGMIAAGNAVVFSPHPRAKNTSLYAIKIFNQAIVEAGGPKNLITTVANPSIEQAEIMMKHKTIKMLVATGGPGVVKAVLSSGKKAIGAGAGNPPVVVDETADIEKAAKDIIAGCSFDNNLPCVAEKEVIAVESIADRLIDYMKKHGAYEITNKEQIQQLTDLVVENGHANKEFVGKDAAYILKHIGINVPPDIRVAIMEVDGKHPLVTVELMMPILPIVRVKNVDQAIELAVEVEHGFRHTAIMHSKNVDHLTKFAKAIQTTIFVKNAPSYAGIGVGGEGYATFTIAGPTGEGLTSAKDFARKRKCVLVDALSIR

SEQ ID NO: 456 - protein, 463 aa, Geobacillus sp.
MDAQKIEKLVRKILEEMEEKKKPAETECEWGIFDHMNQAIEAAEIAQKELVQLSLGQRGKLIEAIRKAAKENAEKFARMAVDETGMGKYEDKIVKNLLAAEKTPGIEDLRTEVFSGDDGLTLVELSPYGVIGAITPTTNPTETIICNSIGMIAAGNAVVFSPHPRAKNTSLYAIKIFNQAIVEAGGPKNLITTVANPSIEQAEIMMKHKTIKMLVATGGPGVVKAVLSSGKKAIGAGAGNPPVVVDETADIEKAAKDIIAGCSFDNNLPCVAEKEVIAVESIADRLIDYMKKHGAYEITNKEQIQQLTDLVVENGHANKEFVGKDAAYILKHIGINVPPDTRVAIMEVDGKHPLVTVELMMPILPIVRVKNVDQAIELAVEVEHGFRHTAIMHSKNVDHLTKFAKAIQTTIFVKNAPSYAGIGVGGEGYATFTIAGPTGEGLTSAKDFARKRKCVLVDALSIR

SEQ ID NO: 457 - protein, 463 aa, Geobacillus thermoglucosidasius
MDAQKIEKLVRKILEEMEEKKKPAETECEWGIFDHMNQAIEAAEIAQKEFVQLSLGQRGKLIEAIRKAAKENAEKFARMAVDETGMGKYEDKIVKNLLAAEKTPGIEDLRTEVFSGDDGLTLVELSPYGVIGAITPTTNPTETIICNSIGMIAAGNAVVFSPHPRAKNTSLYAIKIFNQAIVEAGGPKNLITTVANPSIEQAEIMMKHKTIKMLVATGGPGVVKAVLSSGKKAIGAGAGNPPVVVDETADIEKAAKDIIAGCSFDNNLPCVAEKEVIAVESIADRLIDYMKKHGAYEITNKEQIQQLTDLVVENGHANKEFVGKDAAYILKHIGINVPPDIRVAIMEVDGKHPLVTVELMMPILPIVRVKNVDQAIELAVEVEHGFRHTAIMHSKNVDHLTKFAKAIQTTIFVKNAPSYAGIGVGGEGYATFTIAGPTGEGLTSAKDFARKRKCVLVDALSIR

SEQ ID NO: 458 - protein, 463 aa, Bacillus azotoformans
MAVEAKAIEEIVKKILEEMMIKKDACITGYGIFEDMNEAIEAATIAQKELLKLSLEQRGNLITAIRKAAKDNAETFAQMAVDETGMGNYGDKVIKNLIAAEKTPGIEDLTTEAFSGDHGLTLVELSPYGVIGSITPTTNPTETVICNSIGMIAAGNAVVFSPHPTAKNTSLKAIEVINKAIIKAGGPPNLITSVANPTIDQANIMMKHKKIKLLVATGGPGVVKAVLSSGKKAIGAGAGNPPAVVDETANLEKAARDIIDGCSFDNNLPCTAEKEVIVVDSVADYLVSYMKKHGAFLITDKEQIQKLTELVVDNGHANKELVGKSVAHILQRIGIEVPSDARVAILNVERNHPLVKAELMMPILPVVRVENVDAAIELAVEAEQGFRHTAIMHSTNIDNLTKFSKEIQTTIFVKNGPSYAGIGIGGEGYATFTIAGPTGEGLTSAKDFARRRKCVLVDGLSIR

SEQ ID NO: 459 - protein, 503 aa, Clostridium sticklandii
MKAGDIVQDFITERDVEKIIEQVLSKLEPVIEQVKPKEINMLPNKTNIDFSQNANGIFESIDLAVESALEAHIILTSYKLEDREKMIQSIRKEVLGDIENIARLVYEETKLGKYEDKIAKINLAASKTPGTEDIKTSAISGDYGLTIEEMAPFGVIGAVTPVTNPVETLINNAISMISGGNSVVFNVHPSSKKSSAYTVELINKAVLKAGGPQNLVTMVKEPTIETVNQLSSHPRISMMVGTGGPGLVKSLLKSGKKTIGAGAGNPPVVVDETADMNLAAKGIIEGASFDNNILCIAEKEVFVVNEVADDLIYNMLSSGAYMLNQEELEKVMKLTLVEDEDLGAKSCTLSPKKKYHVHKNWVGKDASKILSEIGITKQDVKLLICEVDSDHPYVTLEQMMPILPLVRCSDVDEAIKLAVKAEGTNKHTASIFSRNVDNMTKFARAINTTIFVKNAPTLAGVGYKGEGNATFTIAGPTGEGITSAKTFTRVRRCVLAEGGFRIV

SEQ ID NO: 460 - protein, 482 aa, Thermincola potens
MAIEAYQIEKIVEEVMRKMVSGGSGDSFAGKAKGIFESVDEAVKAAKAAQKELVAMRIEKREMLLKAMREAAIAHAEELARLAVEETGMGRVTDKIIKNRVAAEKTPGTENLQPSAVTGDRGLTLIERAPYGVIGAITPSTNPCATVINNSISMVAAGNSVVFSVHPGAKKASLLTVEILNEAIEKAGGPANVLTAVASPSLENTNALMKHPDIKLLVATGGPGLVKAVLSSGKKAIGAGAGNPPALVDETADLERAAKSIVAGASFDNNLPCIAEKEVIVVDYVANQLISYMKQNGAYLANDREIKALMDLVLTKNENLKAEGCTVKPEKLYGGINKEYVGKDAAYIMKKIGVDIPEDTKLIICEVDEDHPFVLEELMMPILPIVRVPNVQKAIEVGVRVEHGNRHTAVMHSQNIDNLSAFARAVQTTIFVKNGPSYAGIGIGGEGYTTFTIAGPTGEGLTAASSFTRQRRCVLVDGFSIV

SEQ ID NO: 461 - protein, 462 aa, Clostridium sp.
MSVNEQMIQDIVSEVMAKMQIASEVSDNHGIFADMNEAIEAAKKAQKIVGRMSMDQREKIISNIRKKTVENAEILARMGVQETGMGNVGHKILKHQLVAEKTPGTEDITTTAWSGDRGLTLIEMGPFGVIGAITPCTNPSETVLCNTIGMLAGGNTVVFNPHPGAIKTSIFAINMINEASLEAGGPDNIACTVEKPTLESSNIMMKHKAIHLIAATGGPGVVTAVLSSGKRGIGAGAGNPPALVDETADIRKAAEDIVNGCTFDNNLPCIAEKEIVAVDSVADELMHYMVSEQGCYLASKEEQEALTAVVLKDGRLNRNCVGRDAKTLLGMIGVSVPDNIRCITFEGPKEHPLIATELMMPILGVVRAKDFDDAVEQSVWLEHGNRHSAHIHSKNVDNITKYAKAIDTAILVKNGPSYAAIGFGGEGFCTFTIASRTGEGLTSASTFTKRRRCVMSDSLCIR

SEQ ID NO: 462 - protein, 470 aa, Fusobacterium sp.
MRGELMEFEVNNIEKIVELIMKKMAESNISTAGNSKNGVFDNVDEAIEEAKKAQAILFSSKLELREKIIASIRDTLKSHVTELAELAVKETGMGRVSDKELKNKIAIEKTPGLEDLKAFAFSGDDGLTVMELSPYGVIGAITPSTNPSETVICNSIGMIAAGNAVIFAPHPGAKRTSIRTVELINEAIRKVGGPDNLVVTIREPSIENTEKIIANPNIKMLVATGGPGVVKTVMSSGKKAIGAGAGNPPVLVDETADIEKAAKDIIAGCSFDNNLPCTAEKEVVAVDSIVNYLIFEMQKNGAYLLKDKKLIEKLLSLVLKNNSPDRKYVGRDAKYLLKQIGIEVGDEIKVIIVETDKNHPFAVEELLMPILPIVKVKDALEGIKVAKELERGLRHTAVIHSKNIDILTKYAREMETTILVKNGPSYAGIGIGGEGHVTFTIAGPTGEGLTSAKSFARNRRCVLVGGFSIK

SEQ ID NO: 463 - protein, 470 aa, Fusobacterium sp.
MRGELMEFEVNNIEEIVELIMKKMAESNISTAGNSKNGVFDNVDEAIEEAKKAQAILFSSKLELREKIIASIRDTLKNHVSELAELAVKETGMGRVADKELKNKIAIEKTPGLEDLKAFAFSGDDGLTVMELSPYGVIGAITPSTNPSETVICNSIGMIAAGNAVIFAPHPGAKRTSIRTVELINEAIRKVGGPDNLVVTIREPSIENTEKIIANPNIKMLVATGGPGVVKTVMSSGKKAIGAGAGNPPVLVDETADIEKAAKDIIAGCSFDNNLPCTAEKEVVAVDSIVNYLIFEMQKNGAYLLKDKELIEKLLSLVLKNNSPDRKYVGRDAKYLLKQIGIEVGDEIKVIIVETDKNHPFAVEELLMPILPIVKVKDALEGIKVAKELERGLRHTAVIHSKNIDILTKYAREMETTILVKNGPSYAGIGIGGEGHVTFTIAGPTGEGLTSAKSFARNRRCVLVGGFSIK

SEQ ID NO: 464 - protein, 462 aa, Ruminococcus sp.
MPISENMVQEIVQEVMAKMQIADAPAGKHGVFKDMNDAIEAAKKAQLVVKTMSMDQREKIITCIRKKIKENAEVLARMGVEETGMGNVGDKILKHHLVADKTPGTEDITTTAWSGDRGLTLIEMGPFGVIGAITPCTNPSETVLCNTMGMLAGGNTVVFNPHPAAVKTSIYAINLLNEASLESGGPDNIAVTVEKPTLETSNIMMKHKDIHLIAATGGPGVVTAVLSSGKRGIGAGAGNPPALVDDTADIRKAAQDIVNGCTFDNNLPCIAEKEVVAVSSVVDELMHYMITENDCYLASKEEQDKLVETVLAGGKLNRKCVGRDAKTLLSMIGVQAPANTRCIIFEGPKEHPLITTELMMPILGIVRAKDFDDAVEQAVWLEHGNRHSAHIHSKNIDNITKYAKAIDTAILVKNGPSYSALGFGGEGFCTFTIASRTGEGLTSASTFTKRRRCVMTDSLCIR

SEQ ID NO: 465 - protein, 465 aa, Fusobacterium nucleatum
MEFEVNNIEEIVELIMKKMAESNISTAGNSKNGVFDNVDEAIEEAKKAQAILFSSKLELREKIIASIRDTLKNHVTELAELAVKETGMGRVADKELKNKIAIEKTPGLEDLKAFAFSGDDGLTVMELSPYGVIGAITPSTNPSETVICNSIGMIAAGNAVIFAPHPGAKRTSIRTVELINEAIRKVGGPDNLVVTIREPSIENTEKIIANPNIKMLVATGGPGVVKTVMSSGKKAIGAGAGNPPVLVDETADIEKAAKDIIAGCSFDNNLPCTAEKEVVAVDSIVNYLIFEMQKNGAYLLKDKELIEKLLSLVLKNNSPDRKYVGRDAKYLLKQIGIEVGDEIKVIIVETDKNHPFAVEELLMPILPIVKVKDALEGIKVAKELERGLRHTAVIHSKNIDILTKYAREMETTILVKNGPSYAGIGIGGEGHVTFTIAGPTGEGLTSAKSFARNRRCVLVGGFSIK

SEQ ID NO: 466 - protein, 465 aa, Fusobacterium nucleatum
MEFEVNNIEEIVELIMKKMTEGGVSTSNNSTNGVFKNVDEAIAEAKKAQTVLFSSKLELRERIIASIRDTLKSHITELSELAVKETGMGRVADKELKNRIAIEKTPGLEDLKAFAFSGDDGLTVMELSPYGVIGAITPSTNPSETVICNSIGMIAAGNAVIFAPHPGAKRTSIRAVELINEAIKKAGGPDNLVVTIAEPSIENTEKIIANPNIKMVVATGGPGVVKTVMSSGKKAIGAGAGNPPVLVDETADIEKAAKDIIAGCSFDNNLPCTAEKEVIAVDSIVNYLIFEMQKNGAYLLKDKELIEKLLSIVLKNNSPDRKYVGKDAKYLLKQIGIEVGDEIKVIIVETDKNHPFAVEELLMPILPIVKVKDALEGIKVAKELEKGLRHTAVIHSKNIDILSKYAREMETTILVKNGPSYAGIGIGGEGHVTFTIAGPTGEGLTSARSFARNRRCVLVGGFSIK

SEQ ID NO: 467 - protein, 470 aa, Fusobacterium sp.
MRGELMEFEVNNIEEIVELIMKKMAESNISTAGNSKNGVFDNVDGAIEEAKKAQAILFSSKLELREKIIASIRDTLKNHVTELAELAVKETGMGRVADKELKNKIAIEKTPGLEDLKAFAFSGDDGLTVMELSPYGVIGAITPSTNPSETVICNSIGMIAAGNAVIFAPHPGAKRTSIRTVELINEAIRKVGGPDNLIVTIREPSIENTEKIIANPNIKMLVATGGPGVVKTVMSSGKKAIGAGAGNPPVLVDETADIEKAAKDIIAGCSFDNNLPCTAEKEVVAVDSIVNYLIFEMQKNGAYLLKDKELIEKLLSLVLKNNSPDRKYVGRDAKYLLKQIGIEVGDEIKVIIVETDKNHPFAVEELLMPILPIVKVKDALEGIKVAKELERGLRHTAVIHSKNIDILTKYAREMETTILVKNGPSYAGIGIGGEGHVTFTIAGPTGEGLTSAKSFARNRRCVLVGGFSIK

SEQ ID NO: 468 - protein, 465 aa, Fusobacterium nucleatum
MEFEVNNLEEIVELIMKKMSESSISTSSNSKNGVFENVDEAIAEAKKAQTILFSSKLELRERIIASIRDTLKPYITELSELAVKETGMGRVSDKEIKNRIAIEKTPGLEDLKAFAFSGDDGLTVMELSPYGVIGAITPSTNPSETVICNSIGMIAAGNAVIFAPHPGAKRTSIRAVELINEAIKKVGGPDNLIVTITEPSIENTEKIIANPNIKMVVATGGPGVVKTVMSSGKKAIGAGAGNPPVLVDETADIEKAAKDIIAGCSFDNNLPCTAEKEVIAVDSIVNYLIFEMQKNGAYLLKDKDLIEKLLSIVLKNNSPDRKYVGKDAKYLLKQIGIEVGDEIRVIIVETSKDHPFAVEELLMPILPIVKVKDALEGIKVAKELEKGLRHTAIIHSKNIDILSKYAREMETTILVKNGPSYAGIGIGGEGHVTFTIAGPTGEGLTSARSFARNRRCVLVGGFSIK

SEQ ID NO: 469 - protein, 465 aa, Fusobacterium nucleatum
MEFEVNNIEEIVELIMKKMSESGVSTSNNSTNGVFENVDEAIAEAKKAQTVLFSSKLELRERIIASIRDTLKTHITELSELAVKETGMGRVADKELKNRIAIEKTPGLEDLKAFAFSGDDGLTVMELSPYGVIGAITPSTNPSETVICNSIGMIAAGNAVIFAPHPGAKRTSIRAVELINEAIKKAGGPDNLVVTIAEPSIENTEKIIANPNIKMVVATGGPGVVKTVMSSGKKAIGAGAGNPPALVDETADIEKAAKDIIAGCSFDNNLPCTAEKEVIAVDSIVNYLIFEMQKNGAYLLKDKELIEKLLSIVLKNNSPDRKYVGKDAKYLLKQIGIEVGDEIKVIIVETDKNHPFAVEELLMPILPIVKVKDALEGIKVAKELEKGLRHTAVIHSKNIDILSKYAREMETTILVKNGPSYAGIGIGGEGHVTFTIAGPTGEGLTSARSFARNRRCVLVGGFSIK

SEQ ID NO: 470 - protein, 470 aa, Fusobacterium sp.
MRGELMEFEVNNIEEIVELIMKKMAESNISTAGNSKNGVFDNVDEAIEEAKKAQAILFSSKLELREKIIASIRDTLKNHVTELAELAVKETGMGRVADKELKNKIAIEKTPGLEDLKAFAFSGDDGLTVMELSPYGVIGAITPSTNPSETVICNSIGMIAAGNAVIFAPHPGAKRTSIRTVELINEAIRKVGGPDNLIVTIREPSIENTEKIIANPNIKMLVATGGPGVVKTVMSSGKKAIGAGAGNPPVLVDETADIEKAAKDIIAGCSFDNNLPCTAEKEVVAVDSIVNYLIFEMQKNGAYLLKDKELIEKLLSLVLKNNSPDRKYVGRDAKYLLKQIGIEVGDEIKVIIVETDKNHPFAVEELLMPILPIVKVKDALEGIKVAKELERGLRHTAVIHSKNIDILTKYAREMETTILVKNGPSYAGIGIGGEGHVTFTIAGPTGEGLTSAKSFARNRRCVLVGGFSIK

SEQ ID NO: 471 - protein, 481 aa, Clostridium asparagiforme
MEIETRDIERIVRQVMAAMEQQGTIAGGAYPPAPGITAPRGDNGVFERVEDAIDAAWAAGRVWAFHYKVEDRRRVIEAIRVMARENARTLAQMVRDETGMGRVEDKVEKHLAVADKTPGVECLTTDAISGDGGLMIEEYAPFGVIGAITPSTNPTETVIHNTISMIAGGNSVVFNVHPGAKKCCAFCLQLLNKTIVENGGPANLITMQRDPTMDAVNKMTSSPKIRLMVGTGGMGMVNALLRSGKKTIGAGAGNPPVIVDDTADVKLAARELYWGASFDNNLFCFAEKEVFVMEASADGLIRGLVEQGAYLLTPAETEAIVKLALIQKDGKYEVNKKWVGKDAGLFLQAIGVSGHENTRLLICDVPKCHPYVMVEQLMPVLPIVRCRTFDECIQCSVEAEQGNRHTSSIFSTNVYNMTKFGKEIETTIYVKNGATLRGLGIGGEGHTTMTIAGPTGEGLTCARSFTRRRRCMLAEGGLRII

SEQ ID NO: 472 - protein, 462 aa, Clostridium phytofermentans
MTVNEQLVQDIIKNVVASMQLTQTNKTELGVFDDMNQAIEAAKEAQLVVKKMSMDQREKIISAIRKKTIEHAETLARMAVEETGMGNVGHKILKHQLVAEKTPGTEDITTTAWSGDRGLTLVEMGPFGVIGAITPCTNPSETIICNTIGMLAGGNTVVFNPHPAAIKTSNFAVQLINEASLSAGGPVNIACSVRKPTLDSSKIMMSHQDIPLIAATGGPGVVTAVLQSGKRGIGAGAGNPPVLVDETADIRKAAEDIINGCTFDNNLPCIAEKEVVAIDAIANELMNYMVKEQGCYAITKEQQEKLTNLVITPKGLNRNCVGKDARTLLGMIGIDVPSNIRCIIFEGEKEHPLISEELMMPILGIVRAKSFDDAVEKAVWLEHGNRHSAHIHSKNVDRITTYAKAIDTAILVKNAPSYAAIGFGGEGFCTFTIASRTGEGLTSASTFTKRRRCVMSDSLCIR

SEQ ID NO: 473 - protein, 470 aa, Fusobacterium sp.
MRGELMELEVKNIEEIVDLIMKKMTESNVAVSYDSKNGVFDDVDVAIAEAKKAQTVLFSSKLELRERIIASIRETMRAHITELSELAVKETGMGRVKDKEQKNRVAIDRTPGLEDLKAFAFSGDDGLTVMEFSPYGVIGAITPSTNPSETVICNSIGMIAAGNAVIFAPHPGAKRTSIRAVELINEAIKKVGGPENLVVTISEPSIENTEKIIANPNIKMLVATGGPGVVKTVMSSGKKAIGAGAGNPPVLVDETADIEKAAKDIIDGCSFDNNLPCTAEKEVIAVDSIVNYLIFEMQKNGAYLLKDKELIEKLVSLVLKNNSPDRKYVGKDAKYILKQLGIEVGDEIRVIIVETDKNHPFAVEELLMPVLPIVKVKDALEGIKVAKELERGLRHTAIIHSKNIDILSKYAREMETTILVKNGPSYAGIGIGGEGHVTFTIAGPTGEGLTSARSFARNRRCVLVGGFSIK

SEQ ID NO: 474 - protein, 462 aa, Lachnospiraceae bacterium
MSVNEKMVQDIVQEVVAKMQISSDVSGKKGVFSDMNEAIEASKKAQKIVAKMSMDQREAIISKIREKIKENAEILARMGVEETGMGNVGHKILKHQLVAEKTPGTEDITTTAWSGDRGLTLIEMGPFGVIGAITPCTNPSETVLCNTIGMLAGGNTVVFNPHPAAIKTSIYAVNLLNEASVEVGGPENIAVTVEHPTMETSDVMMKHKDIHLIAATGGPGVVTAVLSSGKRGIGAGAGNPPALVDETADIRKAAEDIVNGCTFDNNLPCIAEKEIVAVDSIADELLHYMVNEQGCYMISKEEQDALTEVVLKGGRLNRKCVGRDAKTLLGMIGITVPDNIRCITFEGPKEHPLIAEELMMPILGVVRAKDFDDAVEQAVWLEHGNRHSAHIHSKNVDNITKYAKAIDTAILVKNGPSYAALGFGGEGYCTFTIASRTGEGLTSASTFTKRRRCVMTDSLCIR

SEQ ID NO: 475 - protein, 462 aa, Ruminococcus gnavus
MSVNEKMVQDIVQEVVAKMQISSDVSGKKGVFSDMNEAIEASKKAQKIVAKMSMDQREAIISKIREKIKENAEILARMGVEETGMGNVGHKILKHQLVAEKTPGTEDITTTAWSGDRGLTLIEMGPFGVIGAITPCTNPSETVLCNTIGMLAGGNTVVFNPHPAAIKTSIYAVNLLNEASVEVGGPENIAVTVEHPTMETSDIMMKHKDIHLIAATGGPGVVTAVLSSGKRGIGAGAGNPPALVDETADIRKAAEDIVNGCTFDNNLPCIAEKEIVAVDSIADELLHYMVSEQGCYMISKEEQDALTEVVLKGGRLNRKCVGRDAKTLLGMIGITVPDNIRCITFEGPKEHPLIAEELMMPILGVVRAKDFDDAVEQAVWLEHGNRHSAHIHSKNVDNITKYAKAIDTAILVKNGPSYAALGFGGEGYCTFTIASRTGEGLTSASTFTKRRRCVMTDSLCIR

SEQ ID NO: 476 - protein, 462 aa, Ruminococcus obeum
MPISESMVQDIVQEVMAKMQIADAPTGKHGVFKEMNDAIEAAKKAELIVKKMSMDQREKIITCIRKKIKENAEVMARMGVDETGMGNVGDKILKHHLVADKTPGTEDITTTAWSGDRGLTLIEMGPFGVIGAITPCTNPSETVLCNTIGMLAGGNTVVFNPHPAAIKTSIFAINLVNEASLEAGGPDNIAVTVEKPTLETSNIMMKHKDIPLIAATGGPGVVTAVLSSGKRGIGAGAGNPPAVVDETADIRKAAQDIVNGCTFDNNLPCIAEKEVVAVSSVVDELMHYMLTENDCYLASKEEQDKLTEVVLAGGKLNRKCVGRDAKTLLSMIGVNAPANTRCIIFEGPKEHPLITTELMMPILGVVRARDFDDAVEQAVWLEHGNRHSAHIHSKNIDNITKYAKAIDTAILVKNGPSYSALGFGGEGYCTFTIASRTGEGLTSASTFTKRRRCVMSDSLCIR

SEQ ID NO: 477 - protein, 473 aa, Clostridium saccharolyticum
MEIGAKEIELIVREVLAGIESRGPKLSYIPAQSDNGVFERVEDAIGAAHTAQREWVEHYRVEDRRRIIEAIRMTAKSHAKTLAKLVWEETGMGRFEDKIQKHMAVIEKTPGVECLTTDAISGDEGLMIEEYAPFGVIGAITPSTNPTETIINNTISMIAGGNAVVFNVHPGAKKCCAHCLKLLHQAIVENGGPANLITMQKEPTMEAVTKMTSDPRIRLMVGTGGMPMVNALLRSGKKTIGAGAGNPPVIVDDSADVSLAAREIYRGASFDNNILCLAEKEVFVMEKAADELVNNLVKEGAYLLNPMELNEILKFAMIEKNGSCEVNKKWVGKDAGLFLEAIGVSGHKDVRLLICETDRNHPFVMVEQLMPILPIVRLRTFEECVESAVAAESGNRHTASMFSRNVENMTRFGKVIETTIFTKNGSTLKGVGIGGEGHTTMTIAGPTGEGLTCARSFTRRRRCMLAEGGLRII

SEQ ID NO: 478 - protein, 471 aa, Flavonifractor plautii
MNIDENVVESIVKRVVSQLSTETASAQTCPSGGDWGVFESMNDAVDAAVEAQREYLNRSMHDRACYVQAIRDVVLDQENLEYISRLAVEETGMGGYEYKLIKNRLAAVKTPGIEDLTTDAMSGDDGLTLVEYSPFGVIGSITPTTNPTETIICNSIGMLAAGNAVVFSPHPRAKKVSLHLIQLINKALCKAGAPANLVVTVSAPSIENTNAMMSHPKIRMLVATGGPAIVKTVLSSGKKAIGAGAGNPPVVVDETADIEKAAKDIVDGCSFDNNLPCIAEKEVIAVDSVADYLIFNMKKNGAYEVKDPAVISQLVELVTKEGKSPKTEFVGKSAKYILDKIGITVGDDVKVILMEAKEDHPFVQVELMMPILPLVRVPDVDQAIEMAVRVEHGNRHTAMMHSRNVEKLTKMAKLIQTTIFVKNGPSYAGIGVGGEGYTTFTIAGPTGEGLTSAKSFARRRRCVLVGGMDVR

SEQ ID NO: 479 - protein, 462 aa, Ruminococcus obeum
MPISESMVQDIVQEVMAKMQIADAPTGKHGIFKDMNDAIEAAKKSELIVKKMSMDQREKIITCIRKKIKENAEVMARMGVDETGMGNVGDKILKHHLVADKTPGTEDITTTAWSGDRGLTLIEMGPFGVIGAITPCTNPSETILCNTMGMLAGGNTVVFNPHPAAIKTSIFAINLVNEASLEAGGPDNIAVTVEKPTLETSNIMMKHKDIPLIAATGGPGVVTAVLSSGKRGIGAGAGNPPAVVDETADIRKAAQDIVNGCTFDNNLPCIAEKEVVAVSSVVDELMHYMLTENDCYLASKEEQDKLTEVVLAGGKLNRKCVGRDARTLLSMIGVNAPANIRCIIFEGPKEHPLITTELMMPILGIVRAKDFDDAVEQAVWLEHGNRHSAHIHSKNVDNITKYAKAIDTAILVKNGPSYSALGFGGEGYCTFTIASRTGEGLTSASTFTKRRRCVMSDSLCIR

SEQ ID NO: 480 - protein, 469 aa, Clostridium carboxidivorans
MELQSNELSLIIEKVLKEMNKKELKEEVSDGVFDTMEEAIEAAYEAQKKFSSYTIEQREKLIAAMRKAIIDNAMEIANLCVNESGMGRVDHKYLKLKLTAEKTPGTEVLQTTAFTGDKGLTLVENGAFGVIGSITPSTNPAATVACNGIGMLAGGNTAVFSPHPGAFRSSLAMLRALNKAIKEAGGPDNLLTSVKKPSIESTNSMMKNDKIRMVVATGGPGIVKMVLSSGRKAIGAGAGNPPVVVDETADIKKAARDIIAGCTFDNNLPCIAEKEALVVEAVYEELIKEMKNNRAVYELNDEEAAKVAELVLVHNKEKNTYSINKAFVGKDAKYILQNIGKNDAEGVECLIYRAENSHPFVQEELMMPILPIVKTKDFEEALKLAVQDEHGNRHTAIMHSKNVDNLTKMARAIDTTIFVKNAPSYAGIGFGGEGYTTFTIAGPTGEGLTNAVSFTRKRRCTMAESFRIV

SEQ ID NO: 481 - protein, 469 aa, Fusobacterium ulcerans
MNLEANNMDEIVALIMKELKKTDIKAGCQSCESPKNGVFSSMDEAIAAAKKAQEILFSSRLEMREKIVASIREVMKDYVVELAELGVKETGMGRAADKALKHQVTIEKTPGVEDLRAFAFSGDDGLTVMELSPYGVIGAITPSTNPSETIICNSIGMISAGNSVVFAPHPGAKRTSIKTVEIINEAVRKAGGPENLVVTIAEPSIENTNRMMENPDIKMLVATGGPGVVKSVMSSGKKAIGAGAGNPPVLVDETADIEKAARDIVAGCSFDNNLPCIAEKEVVAVDSITDYLIFEMQKNGAYLIKDKSVIDRLVAMVLKNGSPNRAYVGKDASYILKDLGINVGGEIRVIITEADKDHPFAVEELLMPILPIIRVKNALEGIEVSKKLEHGLRHTAMIHSKNIDILTKYARDMETTILVKNGPSFAGIGVGGEGHTTFTIAGPTGEGLTSAKSFARNRRCVLVGGLSIK

SEQ ID NO: 482 - protein, 469 aa, Fusobacterium sp.
MNLEANNMDEIVALIMKELKKTDIKAGCQSCESLKNGVFSSMDEAIAAAKKAQEILFSSRLEMREKIVASIREVMKDYVVELAELGVKETGMGRAADKALKHQVTIEKTPGVEDLRAFAFSGDDGLTVMELSPYGVIGAITPSTNPSETIICNSIGMISAGNSVVFAPHPGAKRTSIKTVEIINEAVRRAGGPENLVVTIAEPSIENTNRMMENPDIKMLVATGGPGVVKSVMSSGKKAIGAGAGNPPVLVDETADIEKAARDIVAGCSFDNNLPCIAEKEVVAVDSITDYLIFEMQKNGAYLIKDKSVIDRLVAMVLKNGSPNRAYVGKDASYILKDLGINVGDEIRVIITETDKDHPFAVEELLMPILPIIRVKNALEGIEVSKKLEHGLRHTAMIHSKNIDILTKYARDMETTILVKNGPSFAGIGVGGEGHTTFTIAGPTGEGLTSAKSFARNRRCVLVGGLSIK

SEQ ID NO: 483 - protein, 457 aa, Roseburia inulinivorans
MVHDIVQKVMANMQISGSVSGMHGVFKDMNDAINASIEAQKKVCTMTLDQREQIISLIRKKTHENAEILANMGVNETGMGNVGDKILKHHLTADKVPGTEDISTIAWSGDRGLTLVEMGPFGVIGAITPATNPSETVICNCIGMLAGGNTVVFNPHPNAKKTTIYTINMINEASIEAGGPDNIAVTVEAPTLDTSAIMMKHPSIHLLVATGGPGVVTAVLSSGKRAIGAGAGNPPVLVDETADIRKAAQDIVNGCTFDNNLPCIAEKEIVAVDSVADELMNYMISENGCYLASKEIQDKLVQTVFTPKGALNRKCVGRSAQTLLAMVGVNVGPEIRCIVFEGQKEHPLIAEELMMPILGMVRVKSFEEGVETAVWLEHGNRHSAHIHSKNVDHITTYARALDTAILVKNGPSYAALGFGGEGYCTFTIASRTGEGLTAAHSFTKSRRCTMSDSLCIR

SEQ ID NO: 484 - protein, 469 aa, Clostridium carboxidivorans
MELESNELSVIIEKVLKEMNKKEFGKKESDGIFDTMDEAVEASYEAQKKYSSYSLEQREKLIQAMRKAIMDNAMEVANLCVKESGMGRVDHKYLKLKLIVEKTQGTEILRPEVYTGDNGLTLIEHGAFGVIGAITPSTNPAATVACNSICMLAGGNTVVFSPHPGALNSCLTMIRILNKAIKEAGGPENLITSVKAPSIENTNIMINHKRIRLVVATGGPGIVKLVLSSGKKAIGAGAGNPPVVVDETADIPKAARDIIAGCSFDNNLPCIAEKEAIVVESVYEELIKEFKKNRVVYELTDEEAEKLVGKVLNYDEKNKKYSINKKFVGKDAKYLLESIGKDAGTGVECLIYRAENSHPFVQEELMMPILPIVKVKNVDEAIETAVEDEHGNRHTAMMHSKNVVNLTKMARAIDTTIFVKNAPSYAGIGFGGEGHTTFTIAGPTGEGITNAVTFTRQRRCTMVDSFRIV

SEQ ID NO: 485 - protein, 471 aa, Clostridium sp.
  Clostridium cf. saccharolyticum K10
MEMDMKVIEQLVAQALKEMKAEEPAAFAEKKEENYGVFSTMDEAIEASEKAQKALLFSKIQDRQKYVDIIRAAILKRENLELISRMAVEETEIGKYEHKLIKNRLAAEKTPGTEDLTTEAQTGDHGLTLVEYCPFGVIGAITPTTNPTETIICNSISMIAGGNTVVFSPHPRAKKVSQLLVKMLNKALMEGGAPANLITMVEEPSIENTNKMIEHPGVRLLVATGGPAIVKKVLSSGKKAIGAGAGNPPVVVDETADIEKAARDIVDGCSFDNNVPCIAEKEVFAVDSICDYLIQNMKLNGAYEIRDAETIERLDALVTNEKGGPKTSFVGKSAKYILDKMGIPADDSVKVIIMEVRRDHHLVTEEMMMPILPIVRVSDVDTAIEYAHDAEHGNRHTAMMHSKNVEKLSKMAKLLETTIFVKNAPSYAGIGAGGEGHATFTIAGPTGEGLTSARSFCRKRRCVMSDAFSIR

SEQ ID NO: 486 - protein, 469 aa, Fusobacterium varium
MNLEANNMDEIVALIMKELKKTDIKTVCQSCENPKNGVFSSMDEAITAAKKAQEILFSSRLEMREKIVASIREVMKDYVLELAELGVKETGMGRVADKALKHQVTIEKTPGVEDLKAFAFSGDDGLTVMELSPYGVIGAITPSTNPSETIICNSIGMISAGNSIVFAPHPGAKRTSIKTVEIINEAVRKVGGPENLVVTIAEPSIENTNKMMANPDIKMLVATGGPGVVKSVMSSGKKAIGAGAGNPPVLVDETADIEKAAKDIVAGCSFDNNLPCIAEKEVVAVDSITDYLIFEMQKNGAYLIKDKAVIERLAGMVLKNGSPNRAYVGKDASYILKDLGINVGDEIRVIIAETDKEHPFAVEELLMPILPIIRVKNALEGIEVSKKLEHGLRHTAMIHSKNIDVLTKYARDMETTILVKNGPSFAGIGVGGEGHTTFTIAGPTGEGLTSAKSFARNRRCVLVGGLSIK

SEQ ID NO: 487 - protein, 482 aa, Clostridium celatum
MDDNTKLIQDIVAKVISEIGTKEIEEEACCGNGSCGGSCGCNKEKYVFEDVDSAVAAAKKAYKELKQLTIKDRENIITKIREKCLTYSERLSIMAVDETGMGKVEDKITKHVLVARKTPGTEDLTTTAWSGDGGLTLVERGAFGVIAAITPSTNPTATIFCNSIGMIAAGNSVVFAPHPAAKSCSKFAVKLINEASIEVGGPENIVVTFENPSIEITSALMKHKDIPFISATGGPGVVTQACSSGKRAIGAGAGNPPVLVDETADIKHAAKSIIAGATFDNNLPCIAEKEVVALDSICDELIEDMQKEGAYFLNSTELINRLIDTVLIRKDGKVTLNRNFVGRDAKIILDAIGVYADDSVKCIIFEGCKSNLLIVEELMMPILGIVRVKDFNTAVDVAVELEHGNRHSAHIHSKRIDRLTYFAREIDTAIFVKNAPSYSALGVEAEGYPTFTIASRTGEGLSSAKTFSKSRRCIMKDALSIK

SEQ ID NO: 488 - protein, 462 aa, Clostridium sp.
MSVNERMVQDIVQEVVAKMQIASDVTGNHGVFQDMNAAIEAAKKTQKVVARMSMDQREKIISNIRAKIKEHAEIFARMGVQETGMGNVGHKILKHQLVAEKTPGTEDIQTTAWSGDRGLTLIEMGPFGVIGAITPCTNPSETVLCNTIGMLAGGNTVVFNPHPAAIKTSIYAVNLINEASLEAGGPDNIACTVENPTLESSNIMMKHKDIPLIAATGGPGVVTAVLSSGKRGIGAGAGNPPALVDETADIRKAAEDIVNGCTFDNNLPCIAEKEIVAVDSIADELMHYMISEQGCYLASKEEQDALTEVVLKGGRLNRKCVGRDAKTLLGMIGVTVPDNIRCITFEGPKEHPLIAEELMMPILGVVRAKDFDDAVEQAVWLEHGNRHSAHIHSKNVDNITKYAKAIDTAILVKNGPSYAAIGFGGEGFCTFTIASRTGEGLTSASAFTKRRRCVMCDSLCIR

SEQ ID NO: 489 - protein, 462 aa, Lachnospiraceae bacterium
MSVNEQMVQDIVQEVMAKMQITSDVSGSHGVFKDMNEAIAAAKKTQKIVGKMSMDQREKIISNIRTKIKENAEIMARMGVQETGMGNVGHKILKHVLVAEKTPGTEDITTTAWSGDRGLTLIEMGPFGVIGAITPCTNPSETVLCNTIGMLAGGNTVVFNPHPAAIKTSIFAINLLNEASLEAGGPDNIACTVEKPTLASSDIMMKHKDIPLIAATGGPGVVTAVLSSGKRGIGAGAGNPPALVDETADIRKAAEDIVNGCTFDNNLPCIAEKEIVAVDSIADELMYYMVSEQGCYKITKEEQDALTAVVLKDGKLNRKCVGRDAKTLLGMIGVTVPDNIRCITFEGPKEHPLIAEELMMPILGVVRAKDFDDAVEQAVWLEHGNRHSAHIHSKNVDNITTYAKAIDTAILVKNGPSYAALGFGGEGYCTFTIASRTGEGLTSASTFTKRRRCVMTDSLCIR

SEQ ID NO: 490 - protein, 463 aa, Lachnospiraceae bacterium
MPVSESMVQDIVKEVVARMQLSGSAGTAQHGVFTDMNQAIEAAKEAEAKVRCMTMDQREQIVSNIRRKTHENAELLARMGVEETGMGNVGDKILKHHLLADKTPGTEDITTTAWSGDRGLTLIEMGPFGVIGAITPCTNPSETVLCNSMGMIAAGNTVVFNPHPQAIKTSIFAINMVNEASLEAGGPDNVACTVSKPTLETSNIMMKHKDIPLIAATGGPGVVTAVLSSGKRGIGAGAGNPPALVDETADVRKAAADIVNGCTFDNNLPCIAEKEIVAVDSVADELMNYMISEQGCYLISKEEQDKLTATVITPKGLNRKCVGRDARTLLSMIGIQAPENIRCIVFEGEKEHPLIAEELMMPILGLVRAKDFDDAVEKAVWLEHGNRHSAHIHSKNVDNITKYAKAIDTAILVKNAPSYAALGFGGEGFCTFTIASRTGEGLTSASTFTKRRRCVMSDSLCIR

SEQ ID NO: 491 - protein, 462 aa, Ruminococcus sp.
MPINENMVQEIVQEVMAKMQIADAPTGKHGIFKEMNDAIEAAKKSQLIVKKMSMDQREKIITCIRKKIKENAEVMARMGVEETGMGNVGDKILKHHLVADKTPGTEVITTTAWSGDRGLTLIEMGPFGVIGAITPCTNPSETILCNTMGMLAGGNTVVFNPHPAAIKTSIYAINLLNEASLESGGPDNIAVTVEKPTLETSNVMMKHKDIPLIAATGGPGVVTAVLSSGKRGIGAGAGNPPALVDETADIRKAATDIVNGCTFDNNLPCIAEKEIVAVSSIVDELMHYLVTENDCYLASKEEQDKLTEVVLAGGKLNRKCVGRDARTLLSMIGVNAPANIRCIVFEGPKEHPLITTELMMPILGVVRARDFDDAVEQAVWLEHGNRHSAHIHSKNIDNITKYAKAIDTAILVKNAPSYAALGFGGEGYCTFTIASRTGEGLTCASTFTKRRRCVMADSLCIR

SEQ ID NO: 492 - protein, 469 aa, Acetobacterium woodii
MNIDTTGIEYIVKKVMAEIDCAEEGGKPLKDGELGIFNDMENAIDAAFIAQKSFMRASMAFRSKIIAAMRAEMLKKENMEMICQMAVEETGMGNYEHKLLKHELAATKTPGVEDLVADAFTGDDGLTLIEQSPFGVIGAVSPSTNPSETIICNGIGMLAGGNTVVFAPHPSAKKTSALVVKLLNKAILEAGGPENLIVTTVKPTIDSANTMFASPKITMLCATGGPGVVKSVLQSGKKAIGAGAGNPPALVDETADIEKAGKDIIDGCCFDNNLPCIAEKEVVVVEQVADYLIFNMKKNGAYELKDAQKIKELEELVIPGGRLSRDYVGRSAKVILKGIGIEVDDSVRVVIIETSKDHIFAVEELMMPILAIVRVKDVAEGIDLAVSLEHGNRHTAIMHSTNINNLTEMAKRVQTTIFVKNGPSYAGIGVGGEGYTTFTIAGPTGEGLTSAKTFTRKRRCVLVGGFTIK

SEQ ID NO: 493 - protein, 497 aa, Clostridium botulinum
MNDFNMIDIESIVKNIVKELTGNEKGQGAITTATAPKEANPLVDIEKKIMGFMNTPTMPVGEYGVFEDINDAIEQAWLAEQEYRKVGLDKRTEIIEAFKAEVRKNVEEISRRTFEETGMGRYEDKILKNNLALDKTPGVEDLEAGVKTGDGGLTLYEMSPFGVIGAIAPSTNPTETIINNGISMLAGGNTVVFSPHPGAKDVSVFIVQLINKAIERINGPKNLIVTVKNPNIESTNIMLAHPKVNMICATGGPGIVKVALSSGKKAIGAGAGNPPVVVDETADIEKAAVDIIDGCSFDNNLPCICEKEVIVVDKVADYLKTCMSKYCALEITDKNMLAQLEKLVLTENGTINKQFVGKNADYIMSKLGVNIDPSIRVIFAEVEANHPFAVEELMMPILPVIRVRNVDEAIDLGVELEHGNRHTAIMHSKHIDNLSKFAKAVQTTIFVKNAPSYAGIGYGAEGHGTFTIAGPTGEGLTSARTFTRKRRCVMVDNFSIK

SEQ ID NO: 494 - protein, 497 aa, Clostridium botulinum
MNDFNMIDIESIVKNIVKELTGNEKEQGAIITATAPKEVNPLVDIEKKIMGFMNTPTMQAGEYGVFEDINDAIEQAWLAEQEYRKVGLDKRTEIIEVFKAEVRKNVEEISRRTFEETGMGRYEDKILKNNLALDKTPGVEDLEAGVKTGDGGLTLYEMSPFGVIGAIAPSTNPTETIINNGISMLAGGNTVVFSPHPGAKDVSVFIIQLINKAIERVNGPKNLIVTVRNPNIESTNIMLSHPKVNMICATGGPGIVKVALSSGKKAVGAGAGNPPVVVDETADIEKAAVDIIDGCSFDNNLPCICEKEVIVVDKVTDYLKTCMSKYCALEITDKNMLAQLEKLVLTENGTINKKFVGKNADYIMSKLGINIDPSIRVIFAEVGANHPFAVEELMMPILPIIRVRNVDEAIELGVELEHGNRHTAIMHSKHIDNLSKFAKAVQTTIFVKNAPSYAGIGYGAEGHGTFTIAGPTGEGLTSARTFTRKRRCVMVDNFSIK

SEQ ID NO: 495 - protein, 497 aa, Clostridium botulinum
MNDFNMIDIESIVKNIVKELTGNEKEQGTITTAAVPKEVNPLVDIEKKIMGFVNTPTMPIGEHGVFEDINDAIEQAWIAEQEYRKVGLDKRTEIIEAFKAEVRKNVEEISRRTFEETGMGRYEDKILKNNLALDKTPGVEDLEAGVKTGDGGLTLYEMSPFGVIGAIAPSTNPTETIINNGISMLAGGNTVVFSPHPGAKDVSVFIIQLINKAIERVNGPKNLIVTVRNPNIESTNIMLAHPKVNMICATGGPGIVKVALSSGKKAIGAGAGNPPVVVDETADIEKAAVDIIDGCSFDNNLPCICEKEVIVVDKVADYLKTCMSKYCALEITDKNMLAQLEKLVLTENGTINKKFVGKNADYIMSKLGVNIDPSIRVIFAEVEANHPFAVEELMMPILPVIRVRNVDEAIDLGVELEHGNRHTAIMHSKHIDNLSKFAKAVQTTIFVKNAPSYAGIGYGAEGHGTFTIAGPTGEGLTSARTFTRKRRCVMVDNFSIK

SEQ ID NO: 496 - protein, 462 aa, Eubacterium plexicaudatum
MSVNDQMVQDIVRQVLANMRISSDASGSRGVFSDMNEAVEAAKKAQAVIGKMPMDHREKIISSIRAKIMENAEILARMGVKETGMGNVGHKILKHQLVAEKTPGTEDITTKAWSGDRGLTLIEMGPFGVIGAITPCTNPSETILCNTIGMVAGGNTVVFNPHPAAIKTSIFAVNLVNEASVEAGGPDNIACTVEHPTLDTSAIMMKHKDIHLIAATGGPGVVTAVLSSGKRGIGAGAGNPPALVDETADIRKAAEDIVNGCTFDNNLPCIAEKEIVAVDSIADELMHYMISEQGCYLASAKEQEALISVVLKGGQLNRDCVGRDAKTLLGMIGVQAPDNIRCITFEGPKEHPLITEELMMPILGVVRADSFEDAVEKAVWLEHGNRHSAHIHSKNVDHITTYAKAIDTAILVKNGPSYAAIGFGGEGYCTFTIASRTGEGLTSASAFTKRRRCVMCDSLCIR

SEQ ID NO: 497 - protein, 467 aa, Thermosediminibacter oceani
MVDEKVVEAIAKRIIEELNLCESGSSGGESREELGIFDNLDDAVEAASQAQKRFAALDLEKREEIIQAIREACLNNARYLAELTVNETGIGRVEDKIVKNILAAKKTPGTEDLRPSCWTGDHGLTLVEMAPVGVIGSITPVTNPVATVINNSISMLAAGNAVVFNPHPSAKRSSNKAVEIINEAIMKVGGPRHLVNSVAEPTIETAKALMAHPKVNLVSVTGGKAVVSEALRSGKKVIGAGAGNPPVVVDETADIVKAAHDIYCGASFDNNLPCIAEKELIAVEAVADMLLERLAREGAYILRGKDVEKITEVVFDENHRINKKLVGKDASFILEQIGIQVGKDVRLVVVPVNPEHPLVHHEQLMPVLPFVRVPNIQEAVELAVRAEGGNRHTAVMHSKNVDNMTNFARAIQTTIFVKNAPSYAGIGFGGEGYATFTIAGPTGEGLTSARTFTRQRRCVLVDAFRII

SEQ ID NO: 498 - protein, 479 aa, Clostridium clostridioforme
MEISEKEVEAIVRSVLSGLGQKSFQAEALHVKDKMCSDGEDGIFELVEDAIEAASKAQKEWVHRYKLKDRKRIIEAIRVTSRAHAESLARMVHEETGMGRYEDKITKHMAVIDKTPGVECLVTDAISGDEGLMIEEPAPFGVIGAITPSTNPTETMINNTISMIAGGNAVVFNVHPGAKKCCAYCLQILHRAIVENGGPKNLITMQREPDMDAVHKLTSSPHIRLMVGTGGMGMVHALLCSGKRTIGAGAGNPPVVVDDTADLSLAARELYRGASFDNNLLCLAEKEVFVMDNVAEELVDRLVGEGAYLLDDLQLKKITELAMVNKDGKYEVNKKWVGKDAGKFLEAIGIQEHREPRLLICVTDRSHPFVKVEQLMPVLPIVRCGSFEKCVEWAVDTEAGNRHTASIFSKNVEHMTLFGKEIETTIYTKNGATLKGIGIGGEGHTTMTIAGPTGEGLTCARSFTRRRRCMLAEGGLRII

SEQ ID NO: 499 - protein, 471 aa, Clostridium clostridioforme
MDMDIKVIEQMVEQALKEIKAEQPQKFTMPKAELYGVFKTMDEAIAASEEAQKKLLFSKISDRQKYVDVIRRTILKRENLEMISRLSVEETEIGDYEHKLIKNRLAAEKTPGTEDLLTEAMTGDNGLTLVEYCPFGVIGAITPTTNPTETIINNSISMIAGGNTVVFSPHPRAKKVSQMTVKLLNKALTESGAPENLITMVEEPSIENTNKMIENPSVRLLVATGGPSIVKKVLSSGKKAIGAGAGNPPVVVDETADIVKAAKDIVDGCSFDNNVPCIAEKEVFAVDSICDYLIHNMKENGAYQITDPALLEKLVTLVTNEKGGPKTSFVGKSARYILDKLGITADASVRVIIMEVPKEHLLVQEEMMMPILPVVRVCDVDTAIEYARQAEHGNRHTAMMHSRNVEKLSKMAKIMETTIFVKNAPSYAGIGVGGEGYTTFTIAGPTGEGLTSPRAFCRKRKCVMTDAFSIR

SEQ ID NO: 500 - protein, 472 aa, Ilyobacter polytropus
MNLDANNLNNIVSLIMKELDKNNNIDDTGQGCGGEEGKNGIFSSMDTAVSKAKEAQVTLFASKLELRERIIKAIREDVREAAAELAEIAVEETGMGRVDDKTLKHYVTVDKTPGVEDLRAFAYSGDNGLTVMELSPYGVIGSITPSTNPSETIVCNAIGMIAAGNSVVFAPHPGAKKTSLRAVEILNKAVARAGGPNNLVVTIFEPSIENTNKMVKNPDIKMVVATGGPGVVKSVMSSGKKAIGAGAGNPPVLVDETADIEKAAKDIVNGCSFDNNLPCITEKEVVAVDSITDYLIFEMQKNGAYLVQDSKTIKKLCEMVINDGSPNRAYVGKNASYILKDLGIDVGDEIKVIIVETDAGHPLAVLEMLMPVLPIVRVKDALEGIKVCKKLEDGLRHTAMIHSKNIDILTKYARDMETTILVKNGPSYSGIGVGGEGYTTFTIAGPTGEGLTSAKSFARNRRCALVGGLSIK

SEQ ID NO: 501 - protein, 462 aa, Shuttleworthia satelles
MADEQLVQNVVREVVARMQISAPARGMHGVFSDMEEAIEAARTAQQTVRLLPMDQREKIIGAIRRKTRENAEILARMAVNETGMGNVGDKILKHLLVADKVPGTEDISTRAFSGDRGLTLIEMGPFGVIGAITPCTNPSETVLCNTIGMLAGGNTVVFNPHPQAIKTTLFTIQMVNEASLEAGGPDNIACTVDAPTLATSEIMMKSPHIKLLVATGGPGVVTAVLSSGKRAIGAGAGNPPALVDETADIRKAAEDIVNGCTFDNNLPCIAEKEIVAVDSIADELLHYMLTEQGCYQASEEELDRLTKAVMDEKGRLNRKAVGRSARKLLSMIGVEVDANIRCITFFGPKEHPLITTELMMPILGIVRVKDFAEGLETAAWLEHGNKHSAHIHSKNVDRITEYARRLDTTITVKNGPSYAALGFGGESYCTFTIASRTGEGLTSARSFIKSRHCVMTDSLCVR

SEQ ID NO: 502 - protein, 472 aa, Clostridium beijerinckii
MDVDVVLVEKLVRQAIEEVKNKNLLNLDKFESVKNYGIFGTMDAAVEASFVAQKQLLNASMTDKQKYVDTIKATILKKENLELISRMSVEETEIGKYEHKLIKNRVAAEKTPGIEDLTTEAMTGDNGLTLVEYCPFGVIGAITPTTNPTETIICNSISMIAGGNTVVFSPHPRAKNVSIKLVTMLNKALEEAGAPDNLIATVKEPSIENTNIMMEHPKIRMLVATGGPAIVNKVMSTGKKAIGAGAGNPPVVVDETADIEKAAIDIVNGCSFDNNVPCIAEKEVFAVDQICDYLIHYMKLNGAYEIKDRDLIQKLLDLVTNENGGPKVSFVGKSAPYILNKLGISVDENIKVIIMEVEKNHHFVLEEMMMPILPIVRTKDVDEAIECAYVAEHGNRHTAIMHSKNVDKLTKMARLLETTIFVKNAPSYAGIGVGGEGTTTFTIAGPTGEGLTTARSFCRKRRCVMVDAFNIR

SEQ ID NO: 503 - protein, 471 aa, Clostridium clostridioforme
MDMDIKVIEQMVEQALKEIKAEQPQKFTMPKAELYGVFKTMDEAIAASEEAQKKLLFSKISDRQKYVDVIRRTILKRENLEMISRLSVEETEIGDYEHKLIKNRLAAEKTPGTEDLLTEAMTGDNGLTLVEYCPFGVIGAITPTTNPTETIINNSISMIAGGNTVVFSPHPRAKKVSQMTVKLLNKALTESGAPENLITMVEEPSIENTNKMIENPSVRLLVATGGPSIVKKVLSSGKKAIGAGAGNPPVVVDETADIVKAAKDIVDGCSFDNNVPCIAEKEVFAVDSICDYLIHNMKENGAYQITDPALLEKLVTLVTNEKGGPKTSFVGKSARYILDKLGITADASVRVIIMEVPKEHLLVQEEMMMPILPVVRVCDVDTAIEYARQAEHGNRHTAMMHSRNVEKLSKMAKIMETTIFVKNAPSYAGIGVGGEGYTTFTIAGPTGEGLTSPKAFCRKRKCVMTDAFSIR

SEQ ID NO: 504 - protein, 473 aa, Clostridium sp.
MKLDDKLIEQVARLVMEEMKSGSAAACEENGTCGDSYGIFDSMDDAVQASEAAQRKYLFSTMEDRQKYVDVIRQTVLEPEMLQKISRMAVEETGMGNYEHKLIKNRLAAEKSPGTEDLVTEAMTGDRGLTLVEYCPFGVIGAVTPATNPTETIICNSIAMLAGGNTVVFSPHPRAKNVTHVLVTALNQALEKVGAPTNLIVTVREPSVENTNLMIKHPKIRVLVATGGPGIVKMVMSTGKKAIGAGAGNPPVVVDETADIEKAAKDIVDGCSFDNNLPCIAEKEVIAVDTIADCLIWHMKRVGAFELKEESAISRLLQLVTNEKGGPKVEFVGKSAPYILNKLGISGGENARVILMETQKDHPFVMEELMMPILPIVRAADVDEAIEIALVAERGNRHTAMMHSKNVDKLTKMAKLLQTTIFVKNAPSYAGIGVGGEGCTTFTIAGPTGEGLTTARSFCRKRRCVMSDALHIR

SEQ ID NO: 505 - protein, 478 aa, Clostridium bolteae
MKEGVIRLDMDIKVIEQLVEQALKEIKAEQPLKFTAPKLERYGVFKTMDEAIAASEEAQKKLLFSKISDRQKYVDVIRSTIIKRENLELISRLSVEETEIGDYEHKLIKNRLAAEKTPGTEDLLTEAITGDNGLTLVEYCPFGVIGAITPTTNPTETIINNSISMIAGGNTVVFSPHPRAKKVSQMTVKMLNKALIDNGAPPNLITMVEEPSIENTNKMIDNPSVRLLVATGGPSIVKKVLSSGKKAIGAGAGNPPVVVDETADIDKAAKDIVDGCSFDNNVPCIAEKEVFAVDSICDYLIHHMKENGAYQITDPMLLEQLVALVTTEKGGPKTSFVGKSARYILDKLGITVDASVRVIIMEVPKDHLLVQEEMMMPILPVVRVSDVDTAIEYAHQAEHGNRHTAMMHSKNVEKLSKMAKIMETTIFVKNAPSYAGIGVGGEGYTTFTIAGPTGEGLTSPRTFCRKRKCVMTDAFSIR

SEQ ID NO: 506 - protein, 471 aa, Clostridium bolteae
MDMDIKVIEQLVEQALKEIKAEQPLKFTAPKLERYGVFKTMDEAIAASEEAQKKLLFSKISDRQKYVDVIRSTIIKRENLELISRLSVEETEIGDYEHKLIKNRLAAEKTPGTEDLLTEAITGDNGLTLVEYCPFGVIGAITPTTNPTETIINNSISMIAGGNTVVFSPHPRAKKVSQMTVKMLNKALIDNGAPPNLITMVEEPSIENTNKMIDNPSVRLLVATGGPSIVKKVLSSGKKAIGAGAGNPPVVVDETADIDKAAKDIVDGCSFDNNVPCIAEKEVFAVDSICDYLIHHMKENGAYQITDPMLLEQLVALVTTEKGGPKTSFVGKSARYILDKLGITVDASVRVIIMEVPKDHLLVQEEMMMPILPVVRVSDVDTAIEYAHQAEHGNRHTAMMHSKNVEKLSKMAKIMETTIFVKNAPSYAGIGVGGEGYTTFTIAGPTGEGLTSPRTFCRKRKCVMTDAFSIR

SEQ ID NO: 507 - protein, 468 aa, Eubacterium hallii
MNIDVELIEKVVKKVLNDVETGSSESEYGYGIFDTMDEAIEASAKAQKEYMNHSMADRQRYVEGIREVVCTKENLEYMSKLAVEESGMGAYEYKVIKNRLAAVKSPGVEDLTTEALSGDDGLTLVEYCPFGVIGAIAPTTNPTETVICNSIAMLAGGNTVVFSPHPRSKGVSIWLIKKLNAKLEELGAPRNLIVTVKEPSIENTNIMMNHPKVRMLVATGGPGIVKAVMSTGKKAIGAGAGNPPVVVDETADIEKAAKDIVNGCSFDNNLPCIAEKEVIAVDQIADYLIFNMKNNGAYEVKDPEIIEKMVDLVTKDRKKPAVNFVGKSAQYILDKVGIKVGPEVKCIIMEAPKDHPFVQIELMMPILPIVRVPNVDEAIDFAVEVEHGNRHTAMMHSKNVDKLTKMAKEIETTIFVKNGPSYAGIGVGGMGYTTFTIAGPTGEGLTSAKSFCRKRRCVLQDGLHIRMK

SEQ ID NO: 508 - protein, 467 aa, Halanaerobium saccharolyticum
MKIKENELDKIVNQVISSLNNKQNSNDFNTKINYGIFSTMDEAIAEAVKAQACLQLNYSTEAREKIIKSIRKNVSKHVEKISEMAVEETDMGRIEDKIIKNNLAINKTPGTEDLRTEAFSGKKGLTIVEEAPFGVICSIAPVTNPTETIISNAISMIASCNGVVFNSHPGAKKVSKYIIEVLNKVIMEAGGPENLLTAVNEPTLQTVESCMRDDRIAMIVATGGPGVVNAALSSGKKAIGAGAGNPPVLVDDTVDLKRVAKDIINGASFDNNLPCTSEKAIVALESIADSLLNEMTNQNAQLVHDIKALERVILNDDGSINKALVGKDAAFILNKAGLKAKSEDLRLVIVDVDLRHPFVQKEQLMPVIPLVRAKNFNEAMEMGVDIEEGNRHTAIIHSKNVDNLTKFAKKIETTIYVKNAPSYAGIGAGGEGYATFTIAGPTGEGLTSARSFTRKRRCVLVDGFSII

SEQ ID NO: 509 - protein, 469 aa, Eubacterium limosum
MNIDTTGIEYIVKKVMDQIDYAEETGAPVVDGKDGVFQTMDAAIEAAAVAQKEYMKKPLALRRQMIAAMREIMLKKENIETICAMVVEESGMGNYEHKLAKHRLATTGTPGVEDLLTEAWAGDDGCTLLELSPFGVIGAITPTTNPNETIVNNSIGMLAAGNAVVFSPHPKALKTSFLCIKLLNEAIVSVGGPRNLIVTCANPTIEAANEMMVHPKIRMLVATGGPGVVKAVLSSGKKAIGAGAGNPPALVDETADIEKAAKDIIDGCSFDNNLPCIAEKEVVVVDQVADYLIFNMKKNGAYEITDKKAIDALADLVCPEGRLSRDFVGKSAKYIAAAAGLDVPEDTRVLICETSKDHLLAVEELMMPILPIVRVANVDEGIDVAVELEHGNRHTAIMHSKNVDKLTEMAKRIQTTIFVKNGPSYAGIGFGGEGYPTFTIAGPTGEGLTSAKSFARRRRCVLVGGFDIK

SEQ ID NO: 510 - protein, 466 aa, Thermoanaerobacter sp.
MIDENLVVTITKKILNEINLKEAEEKKEKDNPDLGIFNDVNEAVECAKEAQKKFALMDLEKREEIIAAIREACVNNARLLAEIACSETGRGRVEDKVAKNILAAKKTPGTEDLKPTAWTGDRGLTLVEMAPVGVIASITPVTNPTATIINNTISMLAAGNAVVFNPHPSAKKTSNKAVEIINEAILKVGAPNGLVCSINNPTIQTAQKLMEHPEVNMVVVTGGKAVVQTALRCGKKVIGAGAGNPPVVVDETADIVKAAHDIACGASFDNNLPCIAEKEIIAVERIADTLLERMKREGAYVLHGKDIDRMTELIFQGGAINKDLIGRDAHFILSQIGIETGKDIRLVVMPVDVSHPLVYHEQLMPVIPFVTVPTVEEAINLAVKAEGGNRHTAMMHSKNVENMTAFARAIQTTIFVKNAPSYAGIGFGGEGYTTFTIAGPTGEGLTSARTFTRQRRCVLVDAFRIV

SEQ ID NO: 511 - protein, 529 aa, Rhodospirillum rubrum
MNDGQIAAAVAKVLEAYGVPADPSAAAPAPAAPVAPAAPTAGSVSEMIARGIAKASSDDQIAQIVAKVVGDYSAQAAKPAVVPGAAASTEAGDGVFDTMDAAVDAAVLAQQQYLLCSMTDRQRFVDGIREVILQKDTLELISRMAAEETGMGNYEHKLIKNRLAAEKTPGTEDLTTEAFSGDDGLTLVEYSPFGAIGAVAPTTNPTETIICNSIGMLAAGNSVIFSPHPRATKVSLLTVKLINQKLACLGAPANLVVTVSKPSVENTNAMMAHPKIRMLVATGGPGIVKAVMSTGKKAIGAGAGNPPVVVDETADIEKAALDIINGCSFDNNLPCIAEKEIIAVAQIADYLIFSMKKQGAYQITDPAVLRKLQDLVLTAKGGPQTSCVGKSAVWLLNKIGIEVDSSVKVILMEVPKEHPFVQEELMMPILPLVRVSDVDEAIAVAIEVEHGNRHTAIMHSTNVRKLTKMAKLIQTTIFVKNGPSYAGLGVGGEGYTTFTIAGPTGEGLTSAKSFARKRKCVMVEALNIR

SEQ ID NO: 512 - protein, 466 aa, Eubacterium yurii
MNPELLEDVVRQVLSEMKLESSKMVDIYNYGIFDSVDDAINASEIAQRQLFECSVQKRNEYVNAIRQIILKKDNLEMMSRDAVEETGIGRYEDKILKNKLAAEKTPGMEDLITRAVSGQDGLTLEEYCPFGVIGSITPTTNPTETFISNSISMIVGGNTVVFSPHPRAKNTSIKLVKLMNKALEQVGAPRNLISMVKEPSIENTNLMMNHPKIKMLVATGGPAIVKTVLSSGKKAIGAGAGNPPVVVDETADIEKAAKDIVAGSSFDNNVPCIAEKEVFAVESICDQLIYHMKKNGAYEITSYEMIEKLDKLVSQENGKPNTDFVGKSAKYILEKLGISVDDSIRLIICRTNKDHHLVQEEMLMPILPIVSVSDVDVAIEYAYEAEHRNRHTAIMHSRNVEKLSKMAKKLEATIFVKNAPSYAGIGVGGEGYTTFTIAGPTGEGLTSPKSFCRVRRCTMSDSFSIR

SEQ ID NO: 513 - protein, 466 aa, Eubacterium sp.
MNPELLEDVVRQVLSEMKLESSKMVDIYNYGIFDSVDDAINASEIAQRQLFECSVQKRNEYVNAIRQIILKKDNLEMMSRDAVEETGIGRYEDKILKNKLAAEKTPGMEDLITRAVSGQDGLTLEEYCPFGVIGSITPTTNPTETFISNSISMIVGGNTVVFSPHPRAKNTSIKLVKLMNKALEQVGAPRNLISMVKEPSIENTNLMMNHPKIKMLVATGGPAIVKTVLSSGKKAIGAGAGNPPVVVDETADIEKAAKDIVAGSSFDNNVPCIAEKEVFAVESICDQLIYHMKKNGAYEITSYEMIEKLDKLVSQENGKPNTDFVGKSAKYILEKLGINVDDSIRLIICRTNKDHHLVQEEMLMPILPIVSVSDVDVAIEYAYEAEHRNRHTAIMHSRNVEKLSKMAKKLEATIFVKNAPSYAGIGVGGEGYTTFTIAGPTGEGLTSPKSFCRVRRCTMSDSFSIR

SEQ ID NO: 514 - protein, 532 aa, Vibrio sp.
MNEQEIAHAVENVLSKYTNVTAQNAEPVSYSSNASLENIVSQALAGNMVKQPETQTAPDLNSNIENIVSQILAENQAKPQSVQCQSANHGTTEYLGCFASMEEAISAASHAQVQYRHCTMGDRASFVKGIREVFTQDDVLEKISRMAVEETGMGNYADKLTKNRIAATKTPGIEDLTTSALSGDSGLTLTEFSAYGVIGSITPTTNPTETIINNSIGMLAAGNTVVYSPHPRSRNVSLVAVDLINRKLAELGAPANLVVTVLEPSIDNTNAMMNDPRVNMLVATGGPSIVKTVMSTGKKAIGAGAGNPPAVVDETANIEKAAKDIINGCAFDNNLPCIAEKEVIVVNEVADYLIHCMKKSGAYLLCDKQKIQQLQSLVLNEKGTGPNTSFVGKGARYILDKLNIQVSDDIKVILIETERNHPFVVHELMMPILPVVRVENVDEAIDLAIKVEHGNRHTAIMHSTNVEKLSKMARLIQTTIFVKNGPSYSGIGVGGEGHTTFTIAGPTGEGITSARSFARYRRCVMVEALNIR

SEQ ID NO: 515 - protein, 467 aa, Eubacteriaceae bacterium
MNAELLQDVVRQVLSEMKLESSNILSNEYNYGIFDDMEAAINASETAQRKLFECSVQQRNEFANVIRKEILKKDNLEMISRDAVEETEIGRFEDKILKNKVAAEKTPGMEDLTTRAISGKDGLMIEEYCPFGVIGSITPTTNPTETLINNSISMIVGGNTVVFSPHPRAKNVSIKLVKMMNKALEEHGAPRNMITMVKEPSIENTNLMMSNPKVKLLVATGGPFIVNTVLSSGKKAIGAGAGNPPVVVDETADIEKAAIDIVSGASFDNNVPCIAEKEVFAVDSISDMLIYHMKKNGAYEIVSQDMIEKLDKLVSQENGKPKTEFVGKSAKYILEKLGIYVDDSIRLIICRTSKNHHLVQEEMLMPILPIVSVSDVDIAIEYAYEAEHGNRHTAIMHSKNVEKLSKMAKKLEATIFVKNAPSYSGIGVGGEGHTTFTIAGPTGEGITSAKSFCRIRRCVMHDSFSIR

SEQ ID NO: 516 - protein, 473 aa, Propionibacterium propionicum
MKIDPAQLEATIREVLAAMLPGNDNQTEAPATQQEAPGDGVFADMDSAVEAAHLAQREYLSHPMADRRRYVAAIREAMLAPEALDYMSEQAVAQSGMGDVGHKYLKNKVAAAETPGVEDLVTEAWSGDDGLTTIEYSPYGVIGAITPTTNPTETITCNSIGMLAAGNAVVFSPHPRVAKLSCWQVRRINRALRAAGAPDNLVVTVTAPSLENTNAMMAHPKVRMLVATGGPGIVKAVLSSGKKAIGAGAGNPPAVVDETADIEHAAKCIVDGASFDNNLPCTAEKEIIAVDSIADMLKFCMIKHGAYEATASEVAELEKLLVNGDKPRTEWVGKPAAKILEAIGVTPPPGVRLIVCEASATHPFVVHELMMPVLGLVRVPDVDAAIDLAVELEHGNRHTAVMHSLNVSKLTKMGKLIQTTIFVKNGPSYNGIGIGGEGYPTFTIAGPTGEGLTSARSFTRKRRCVLVGDLNVR

SEQ ID NO: 517 - protein, 467 aa, Eubacteriaceae bacterium
MNAELLQDVVRQVLSEMKLESSNILSNEYNYGIFDDMEAAINASETAQRKLFECSVQQRNEFANVIRKEILKKDNLEMISRDAVEETEIGRFEDKILKNKVAAEKTPGMEDLTTRALTGKDGLMIEEYCPFGVIGSITPTTNPTETLINNSISMIVGGNTVVFSPHPRAKNVSIKLVKMMNKALEEYGAPRNMITMVKEPSIENTNLMMSNPKVKLLVATGGPFIVNTVLSSGKKAIGAGAGNPPVVVDETADIEKAAIDIVSGASFDNNVPCIAEKEVFAVDSISDMLIYHMKKNGAYEIVSQDMIEKLDKLVSQENGKPKTEFVGKSAKYILEKLGIYVDDSIRLIICRTSKNHHLVQEEMLMPILPIVSVSDVDIAIEYAYEAEHGNRHTAIMHSKNVEKLSKMAKKLEATIFVKNAPSYSGIGVGGEGHTTFTIAGPTGEGITSAKSFCRIRRCVMHDSFSIR

SEQ ID NO: 518 - protein, 467 aa, Eubacteriaceae bacterium
MNAELLQDVVRQVLSEMKLESSNILSNEYNYGIFDDMEAAINASETAQRKLFECSVQQRNEFANVIRREVLKKDNLEMISRDAVEETEIGRFEDKILKNKVAAEKTPGMEDLTTRALTGKDGLMIEEYCPFGVIGSITPTTNPTETLINNSISMIVGGNTVVFSPHPRAKNVSIKLVKMMNKALEEYGAPRNMITMVKEPSIENTNLMMSNPKVKLLVATGGPFIVNTVLSSGKKAIGAGAGNPPVVVDETADIEKAAIDIVSGASFDNNVPCIAEKEVFAVDSISDMLIYHMKKNGAYEIVSQDMIEKLDKLVSQENGKPKTEFVGKSAKYILEKLGIYVDDSIRLIICRTSKNHHLVQEEMLMPILPIVSVSDVDIAIEYAYEAEHGNRHTAIMHSKNVEKLSKMAKKLEATIFVKNAPSYSGIGVGGEGHTTFTIAGPTGEGITSAKSFCRIRRCVMHDSFSIR
